(19) United States
(12) Patent Application Publication
(10) Pub. No.: US 2013/0289094 A1
(43) Pub. Date: Oct. 31, 2013

(54) Compositions and Methods for Inhibition of PCSK9 Genes

(71) Applicants: Gregory Hinkle, Cambridge, MA (US); Maria Frank-Kamenetsky, Brookling, MA (US); Kevin Fitzgerald, Cambridge, MA (US)

(72) Inventors: Gregory Hinkle, Cambridge, MA (US); Maria Frank-Kamenetsky, Brookling, MA (US); Kevin Fitzgerald, Cambridge, MA (US)

(73) Assignee: Alnylam Pharmaceuticals, Inc., Cambridge, MA (US)

(21) Appl. No.: 13/882,473

(22) PCT Filed: Oct. 31, 2011
(86) PCT No.: PCT/US11/58682

§ 371 Date: Jul. 16, 2013

Related U.S. Application Data
(60) Provisional application No. 61/408,513, filed on Oct. 29, 2010.

(51) Int. Cl. C12N 15/113

(52) U.S. Cl. CPC C12N 15/1137
USPC 514/44 A; 536/24.5

(57) ABSTRACT

The invention relates to siRNAs targeting a PCSK9 gene, and methods of using siRNAs to inhibit expression of PC-SK9 and to treat PCSK9 related disorders, e.g., hyperlipidemia.

### CROSS REFERENCE TO RELATED APPLICATIONS

[0001] This application claims the benefit of U.S. Provisional Application No. 61/408,513, filed Oct. 29, 2010, which is hereby incorporated in its entirety by reference.

### REFERENCE TO A SEQUENCE LISTING

[0002] Not applicable.

### FIELD OF THE INVENTION

[0003] The invention relates to siRNA compositions directed to PSCK9 and methods of inhibition of PCSK9 gene expression and methods of treatment of pathological conditions associated with PCSK9 gene expression, e.g., hyperlipidemia.

### BACKGROUND OF THE INVENTION

[0004] Proprotein convertase subtilisin kexin 9 (PCSK9) is a member of the subtilisin serine protease family. The other eight mammalian subtilisin proteases, PCSK1-PCSK8 (also called PC1/3, PC2, furin, PC4, PC5/6, PACE4, PC7, and S1P/SKI-1) are proprotein convertases that process a wide variety of proteins in the secretory pathway and play roles in diverse biological processes (Bergeron, F. (2000) J. Mol. Endocrinol. 24, 1-22, Gensberg, K., (1998) Semin. Cell Dev. Biol. 9, 11-17, Seidah, N. G. (1999) Brain Res. 848, 45-62, Taylor, N. A., (2003) FASEB J. 17, 1215-1227, and Zhou, A., (1999) J. Biol. Chem. 274, 20745-20748). PCSK9 has been proposed to play a role in cholesterol metabolism. PCSK9 mRNA expression is down-regulated by dietary cholesterol feeding in mice (Maxwell, K. N., (2003) J. Lipid Res. 44, 2109-2119), up-regulated by statins in HepG2 cells (Dubuc, G., (2004) Arterioscler. Thromb. Vasc. Biol. 24, 1454-1459), and up-regulated in sterol regulatory element binding protein (SREBP) transgenic mice (Horton, J. D., (2003) Proc. Natl. Acad. Sci. USA 100, 12027-12032), similar to the cholesterol biosynthetic enzymes and the low-density lipoprotein receptor (LDLR). Furthermore, PCSK9 missense mutations have been found to be associated with a form of autosomal dominant hypercholesterolemia (Hchola3) (Abifadel, M., et al. (2003) Nat. Genet. 34, 154-156, Timms, K. M., (2004) Hum. Genet. 114, 349-353, Leren, T. P. (2004) Clin. Genet. 65, 419-422). PCSK9 may also play a role in determining LDL cholesterol levels in the general population, because single-nucleotide polymorphisms (SNPs) have been associated with cholesterol levels in a Japanese population (Shioji, K., (2004) J. Hum. Genet. 49, 109-114).

[0005] Autosomal dominant hypercholesterolemias (ADHs) are monogenic diseases in which patients exhibit elevated total and LDL cholesterol levels, tendon xanthomas, and premature atherosclerosis (Rader, D. J., (2003) J. Clin. Invest. 111, 1795-1803). The pathogenesis of ADHs and a recessive form, autosomal recessive hypercholesterolemia (ARH) (Cohen, J. C., (2003) Curr. Opin. Lipidol. 14, 121-127), is due to defects in LDL uptake by the liver. ADH may be caused by LDLR mutations, which prevent LDL uptake, or by mutations in the protein on LDL, apolipoprotein B, which binds to the LDLR. ARH is caused by mutations in the ARH protein that are necessary for endocytosis of the LDLR-LDL complex via its interaction with clathrin. Therefore, if PCSK9 mutations are causative in Hchola3 families, it seems likely that PCSK9 plays a role in receptor-mediated LDL uptake.

[0006] Overexpression studies point to a role for PCSK9 in controlling LDLR levels and, hence, LDL uptake by the liver (Maxwell, K. N. (2004) Proc. Natl. Acad. Sci. USA 101, 7100-7105, Benjannet, S., et al. (2004) J. Biol. Chem. 279, 48865-48875, Park, S. W., (2004) J. Biol. Chem. 279, 50630-50638). Adenoviral-mediated overexpression of mouse or human PCSK9 for 3 or 4 days in mice results in elevated total and LDL cholesterol levels; this effect is not seen in LDLR knockout animals (Maxwell, K. N. (2004) Proc. Natl. Acad. Sci. USA 101, 7100-7105, Benjannet, S., et al. (2004) J. Biol. Chem. 279, 48865-48875, Park, S. W., (2004) J. Biol. Chem. 279, 50630-50638). In addition, PCSK9 overexpression results in a severe reduction in hepatic LDLR protein, without affecting LDLR mRNA levels, SREBP protein levels, or SREBP protein nuclear to cytoplasmic ratio.

[0007] Loss of function mutations in PCSK9 have been designed in mouse models (Rashid et al., (2005) PNAS, 102, 5374-5379), and identified in human individuals (Cohen et al. (2005) Nature Genetics 37:161-165). In both cases loss of PCSK9 function lead to lowering of total and LDLc cholesterol. In a retrospective outcome study over 15 years, loss of one copy of PCSK9 was shown to shift LDLc levels lower and to lead to an increased risk-benefit protection from developing cardiovascular heart disease (Cohen et al., (2006) N. Engl. J. Med., 354:1264-1272).

[0008] Double-stranded RNA molecules (dsRNA) have been shown to block gene expression in a highly conserved regulatory mechanism known as RNA interference (RNAi). WO 99/32619 (Fire et al.) disclosed the use of a dsRNA of at least 25 nucleotides in length to inhibit the expression of genes in C. elegans. dsRNA has also been shown to degrade target RNA in other organisms, including plants (see, e.g., WO 99/53050, Waterhouse et al.; and WO 99/61631, Heifetz et al.), Drosophila (see, e.g., Yang, D., et al., Curr. Biol. (2000) 10:1191-1200), and mammals (see WO 00/44895, Limmer; and DE 101 00 586.5, Kreutzer et al.). This natural mechanism has now become the focus for the development of a new class of pharmaceutical agents for treating disorders that are caused by the aberrant or unwanted regulation of a gene.

[0009] A description of siRNA targeting PCSK9 can be found in U.S. patent application Ser. No. 11/746,864 filed on May 10, 2007 (now U.S. Pat. No. 7,605,251) and International Patent Application No. PCT/US2007/068655 filed May 10, 2007 (published as WO 2007/134161). Additional disclosure can be found in U.S. patent application Ser. No. 12/478,452 filed Jun. 4, 2009 (published as US 2010/0010066) and International Patent Application No. PCT/US2009/032743 filed Jan. 30, 2009 (published as WO 2009/134487).

### SUMMARY OF THE INVENTION

[0010] As described in more detail below, disclosed herein are compositions comprising siRNA targeting PCSK9. Also disclosed are methods of for inhibition of PCSK9 expression and for treatment of pathologies related to PCSK9 expression, e.g., hyperlipidemia.

[0011] Accordingly, one aspect of the invention is a double-stranded ribonucleic acid (dsRNA) for inhibiting expression of PCSK9, wherein said dsRNA includes a sense strand and an antisense strand, the antisense strand having a region of complementarity to a PCSK9 mRNA transcript, wherein the antisense strand includes at least 15 contiguous nucleotides differing by no more than 3 nucleotides from one of the antisense sequences listed in Table 1, 2, 6 or 7. In some embodiments the dsRNA is a dsRNA described in Table 1, 2, 6 or 7. The dsRNA can be AD-27919.

[0012] Any dsRNA of the invention can have region of complementarity is at least 17 nucleotides in length, e.g., between 19 and 21 nucleotides in length, e.g., 19 nucleotides in length. In some embodiments, the region of complementarity is an antisense sequence of Table 1, 2, 6 or 7.

[0013] A dsRNA can include at least one modified nucleotide. Examples of modified nucleotides include a 2′-O-methyl modified nucleotide, a nucleotide comprising a 5′-phosphorothioate group, a terminal nucleotide linked to a cholesteryl derivative or dodecanoic acid bisdecylamide group, a 2′-deoxy-2′-fluoro modified nucleotide, a 2′-deoxy-modified nucleotide, a locked nucleotide, an abasic nucleotide, 2′-amino-modified nucleotide, 2′-alkyl-modified nucleotide, morpholino nucleotide, a phosphoramidate, and a non-natural base comprising nucleotide.

[0014] Each strand of a dsRNA of the invention is typically is no more than 30 nucleotides in length, e.g., each strand is 15-25 nucleotides, 19-23 nucleotides, or 21 nucleotides in length. The sense and antisense strands can be the same length or can differ in length.

[0015] In some embodiments a dsRNA of the invention includes an overhang, e.g., at least one strand includes a 3′ overhang of at least 1 nucleotide. A dsRNA can include at least one strand having a 3′ overhang of at least 2 nucleotides, e.g., both strands can includes a 3′ overhang of 2 nucleotides.

[0016] A dsRNA of the invention can include a ligand. In some embodiments, the ligand is conjugated to the 3′ end of the sense strand of the dsRNA. The ligand can be a lipid based ligand.

[0017] Also included in the invention is a cell containing the dsRNA described herein, a vector encoding at least one strand of a dsRNA described herein, and a cell containing said vector.

[0018] Also included in the invention are pharmaceutical compositions for inhibiting expression of a PCSK9 gene comprising a dsRNA of the invention. The pharmaceutical composition can include a lipid formulation. In one embodiment, the lipid formulation is a nucleic acid lipid particle formulation.

[0019] Another aspect of the invention is a method of inhibiting PCSK9 expression in a cell, having the steps of introducing into the cell a dsRNA of the invention and maintaining the cell produced for a time sufficient to obtain degradation of the mRNA transcript of a PCSK9 gene, thereby inhibiting expression of the PCSK9 gene in the cell. In some embodiments the PCSK9 expression is inhibited by at least 30%.

[0020] Also included is a method of treating a disorder mediated by PCSK9 expression comprising administering to a human in need of such treatment a therapeutically effective amount a dsRNA of the invention. The disorder can be, e.g., hyperlipidemia. The dsRNA can be administered at a concentration of, e.g., 0.01 mg/kg to 5 mg/kg bodyweight of the subject.

[0021] In another embodiment, the invention includes a method for treating hypercholesterolemia in a human heterozygous for an LDLR gene having the steps of determining an LDLR genotype or phenotype of the human and administering to the human an effective amount of an MC3 comprising lipid formulated AD-9680 dsRNA at a dosage of 0.01-5.0 mg/kg bodyweight wherein administering results in a lowering of serum cholesterol.

[0022] In another embodiment, the invention includes a method for treating hypercholesterolemia in a subject heterozygous for an LDLR gene the method having the steps of administering to the subject an effective amount of a dsRNA for inhibiting expression of PCSK9, wherein said dsRNA comprises a sense strand and an antisense strand, the antisense strand comprising a region of complementarity to a PCSK9 RNA transcript and the dsRNA is 30 base pairs or less in length. In some embodiments of the method, the antisense strand the dsRNA is complementary to at least 15 contiguous nucleotides of the sense sequence of AD-9680 or the sense sequence of AD-10792. In other embodiments, the dsRNA consists of AD-10792 or AD-9680. The subject can, e.g., a primate, e.g., a human, or a rodent, e.g., a mouse. The effective amount can be, for example, at a concentration of 0.01-5.0 mg/kg bodyweight of the subject. The method can also include determining an LDLR genotype or phenotype of the subject and/or determining the serum cholesterol level in the subject. In some embodiments, administering results in a decrease in serum cholesterol in the subject.

[0023] In some embodiments of the methods of the invention, dsRNA used in the method is lipid formulated, e.g., the dsRNA is lipid formulated in a formulation selected from Table A.

### DESCRIPTION OF THE DRAWINGS

[0024] FIG. 1 is a graph with the results of PCSK9 administration to wild-type and LDLR heterozygous mice.

### DETAILED DESCRIPTION OF THE INVENTION

[0025] The invention provides a solution to the problem of treating diseases that can be modulated by the down regulation of the PCSK9 gene, such as hyperlipidemia, by siRNA to silence the PCSK9 gene.

[0026] The invention provides compositions and methods for inhibiting the expression of the PCSK9 gene in a subject using siRNA. The invention also provides compositions and methods for treating pathological conditions and diseases, such as hyperlipidemia, that can be modulated by down regulating the expression of the PCSK9 gene.

### DEFINITIONS

[0027] For convenience, the meaning of certain terms and phrases used in the specification, examples, and appended claims, are provided below. If there is an apparent discrepancy between the usage of a term in other parts of this specification and its definition provided in this section, the definition in this section shall prevail.

[0028] “G,” “C,” “A,” “T” and “U” each generally stand for a nucleotide that contains guanine, cytosine, adenine, thymidine and uracil as a base, respectively. “T” and “dT” are used interchangeably herein and refer to a deoxyribonucleotide wherein the nucleobase is thymine, e.g., deoxyribothymine. However, it will be understood that the term “ribonucleotide” or “nucleotide” can also refer to a modified nucleotide, as further detailed below, or a surrogate replacement moiety. The skilled person is well aware that guanine, cytosine, adenine, and uracil may be replaced by other moieties without substantially altering the base pairing properties of an oligonucleotide comprising a nucleotide bearing such replacement moiety. For example, without limitation, a nucleotide comprising inosine as its base may base pair with nucleotides containing adenine, cytosine, or uracil. Hence, nucleotides containing uracil, guanine, or adenine may be replaced in the nucleotide sequences of dsRNA featured in the invention by a nucleotide containing, for example, inosine. In another example, adenine and cytosine anywhere in the oligonucleotide can be replaced with guanine and uracil, respectively to form G-U Wobble base pairing with the target mRNA. Sequences containing such replacement moieties are suitable for the compositions and methods featured in the invention.

[0029] The term “PCSK9” refers to the proprotein convertase subtilisin kexin 9 gene or protein (also known as FH3, HCHOLA3, NARC-1, NARC1). Examples of mRNA sequences to PCSK9 include but are not limited to the following: human: NM_{—}174936; mouse: NM_{—}153565, and rat: NM_{—}199253. Additional examples of PCSK9 mRNA sequences are readily available using, e.g., GenBank.

[0030] As used herein, the term “iRNA” refers to an agent that contains RNA and which mediates the targeted cleavage of an RNA transcript via an RNA-induced silencing complex (RISC) pathway. The term iRNA includes siRNA.

[0031] As described in more detail below, the term “siRNA” and “siRNA agent” refers to a dsRNA that mediates the targeted cleavage of an RNA transcript via an RNA-induced silencing complex (RISC) pathway. In general an siRNA is a dsRNA.

[0032] A “double-stranded RNA” or “dsRNA,” as used herein, refers to an RNA molecule or complex of molecules having a hybridized duplex region that comprises two anti-parallel and substantially complementary nucleic acid strands, which will be referred to as having “sense” and “antisense” orientations with respect to a target RNA.

[0033] The term “target gene” refers to a gene of interest, e.g., PCSK9 or a second gene, e.g., XBP-1, targeted by an siRNA of the invention for inhibition of expression.

[0034] As described in more detail below, “target sequence” refers to a contiguous portion of the nucleotide sequence of an mRNA molecule formed during the transcription of a target gene, including mRNA that is a product of RNA processing of a primary transcription product. The target portion of the sequence will be at least long enough to serve as a substrate for iRNA-directed cleavage at or near that portion. For example, the target sequence will generally be from 9-36 nucleotides in length, e.g., 15-30 nucleotides in length, including all sub-ranges therebetween.

[0035] As used herein, the term “strand comprising a sequence” refers to an oligonucleotide comprising a chain of nucleotides that is described by the sequence referred to using the standard nucleotide nomenclature.

[0036] As used herein, and unless otherwise indicated, the term “complementary,” when used to describe a first nucleotide sequence in relation to a second nucleotide sequence, refers to the ability of an oligonucleotide or polynucleotide comprising the first nucleotide sequence to hybridize and form a duplex structure under certain conditions with an oligonucleotide or polynucleotide comprising the second nucleotide sequence, as will be understood by the skilled person. Such conditions can, for example, be stringent conditions, where stringent conditions may include: 400 mM NaCl, 40 mM PIPES pH 6.4, 1 mM EDTA, 50° C. or 70° C. for 12-16 hours followed by washing. Other conditions, such as physiologically relevant conditions as may be encountered inside an organism, can apply. The skilled person will be able to determine the set of conditions most appropriate for a test of complementarity of two sequences in accordance with the ultimate application of the hybridized nucleotides.

[0037] Complementary sequences within an iRNA, e.g., within a dsRNA as described herein, include base-pairing of the oligonucleotide or polynucleotide comprising a first nucleotide sequence to an oligonucleotide or polynucleotide comprising a second nucleotide sequence over the entire length of one or both nucleotide sequences. Such sequences can be referred to as “fully complementary” with respect to each other herein. However, where a first sequence is referred to as “substantially complementary” with respect to a second sequence herein, the two sequences can be fully complementary, or they may form one or more, but generally not more than 5, 4, 3 or 2 mismatched base pairs upon hybridization for a duplex up to 30 base pairs, while retaining the ability to hybridize under the conditions most relevant to their ultimate application, e.g., inhibition of gene expression via a RISC pathway. However, where two oligonucleotides are designed to form, upon hybridization, one or more single stranded overhangs, such overhangs shall not be regarded as mismatches with regard to the determination of complementarity. For example, a dsRNA comprising one oligonucleotide 21 nucleotides in length and another oligonucleotide 23 nucleotides in length, wherein the longer oligonucleotide comprises a sequence of 21 nucleotides that is fully complementary to the shorter oligonucleotide, may yet be referred to as “fully complementary” for the purposes described herein.

[0038] “Complementary” sequences, as used herein, may also include, or be formed entirely from, non-Watson-Crick base pairs and/or base pairs formed from non-natural and modified nucleotides, in as far as the above requirements with respect to their ability to hybridize are fulfilled. Such non-Watson-Crick base pairs includes, but are not limited to, G:U Wobble or Hoogstein base pairing.

[0039] The terms “complementary,” “fully complementary” and “substantially complementary” herein may be used with respect to the base matching between the sense strand and the antisense strand of a dsRNA, or between the antisense strand of an iRNA agent and a target sequence, as will be understood from the context of their use.

[0040] As used herein, a polynucleotide that is “substantially complementary to at least part of” a messenger RNA (mRNA) refers to a polynucleotide that is substantially complementary to a contiguous portion of the mRNA of the target gene (e.g., an mRNA encoding PCSK9). For example, a polynucleotide is complementary to at least a part of a PCSK9 mRNA if the sequence is substantially complementary to a non-interrupted portion of an mRNA encoding PCSK9.

[0041] The skilled artisan will recognize that the term “RNA molecule” or “ribonucleic acid molecule” encompasses not only RNA molecules as expressed or found in nature, but also analogs and derivatives of RNA comprising one or more ribonucleotide/ribonucleoside analogs or derivatives as described herein or as known in the art. Strictly speaking, a “ribonucleoside” includes a nucleoside base and a ribose sugar, and a “ribonucleotide” is a ribonucleoside with one, two or three phosphate moieties. However, the terms “ribonucleoside” and “ribonucleotide” can be considered to be equivalent as used herein. The RNA can be modified in the nucleobase structure or in the ribose-phosphate backbone structure, e.g., as described herein below. However, the molecules comprising ribonucleoside analogs or derivatives must retain the ability to form a duplex. As non-limiting examples, an RNA molecule can also include at least one modified ribonucleoside including but not limited to a 2′-O-methyl modified nucleotide, a nucleoside comprising a 5′ phosphorothioate group, a terminal nucleoside linked to a cholesteryl derivative or dodecanoic acid bisdecylamide group, a locked nucleoside, an abasic nucleoside, a 2′-deoxy-2′-fluoro modified nucleoside, a 2′-amino-modified nucleoside, 2′-alkyl-modified nucleoside, morpholino nucleoside, a phosphoramidate or a non-natural base comprising nucleoside, or any combination thereof. Alternatively, an RNA molecule can comprise at least two modified ribonucleosides, at least 3, at least 4, at least 5, at least 6, at least 7, at least 8, at least 9, at least 10, at least 15, at least 20 or more, up to the entire length of the dsRNA molecule. The modifications need not be the same for each of such a plurality of modified ribonucleosides in an RNA molecule. In one embodiment, modified RNAs contemplated for use in methods and compositions described herein are peptide nucleic acids (PNAs) that have the ability to form the required duplex structure and that permit or mediate the specific degradation of a target RNA via a RISC pathway.

[0042] In one aspect, a modified ribonucleoside includes a deoxyribonucleoside. In such an instance, an iRNA agent can comprise one or more deoxynucleosides, including, for example, a deoxynucleoside overhang(s), or one or more deoxynucleosides within the double stranded portion of a dsRNA. However, it is self evident that under no circumstances is a double stranded DNA molecule encompassed by the term “iRNA.”

[0043] As used herein, the term “nucleotide overhang” refers to at least one unpaired nucleotide that protrudes from the duplex structure of an iRNA, e.g., a dsRNA. For example, when a 3′-end of one strand of a dsRNA extends beyond the 5′-end of the other strand, or vice versa, there is a nucleotide overhang. A dsRNA can comprise an overhang of at least one nucleotide; alternatively the overhang can comprise at least two nucleotides, at least three nucleotides, at least four nucleotides, at least five nucleotides or more. A nucleotide overhang can comprise or consist of a nucleotide/nucleoside analog, including a deoxynucleotide/nucleoside. The overhang(s) may be on the sense strand, the antisense strand or any combination thereof. Furthermore, the nucleotide(s) of an overhang can be present on the 5′ end, 3′ end or both ends of either an antisense or sense strand of a dsRNA. One or more of the nucleotides in the overhang can be replaced with a nucleoside thiophosphate.

[0044] The terms “blunt” or “blunt ended” as used herein in reference to a dsRNA mean that there are no unpaired nucleotides or nucleotide analogs at a given terminal end of a dsRNA, i.e., no nucleotide overhang. One or both ends of a dsRNA can be blunt. Where both ends of a dsRNA are blunt, the dsRNA is said to be blunt ended. To be clear, a “blunt ended” dsRNA is a dsRNA that is blunt at both ends, i.e., no nucleotide overhang at either end of the molecule. Most often such a molecule will be double-stranded over its entire length.

[0045] The term “antisense strand” or “guide strand” refers to the strand of an iRNA, e.g., a dsRNA, which includes a region that is substantially complementary to a target sequence. As used herein, the term “region of complementarity” refers to the region on the antisense strand that is substantially complementary to a sequence, for example a target sequence, as defined herein. Where the region of complementarity is not fully complementary to the target sequence, the mismatches may be in the internal or terminal regions of the molecule. Generally, the most tolerated mismatches are in the terminal regions, e.g., within 5, 4, 3, or 2 nucleotides of the 5′ and/or 3′ terminus.

[0046] The term “sense strand” or “passenger strand” as used herein, refers to the strand of an iRNA that includes a region that is substantially complementary to a region of the antisense strand as that term is defined herein.

[0047] As used herein, the term “SNALP” refers to a stable nucleic acid-lipid particle. A SNALP represents a vesicle of lipids coating a reduced aqueous interior comprising a nucleic acid such as an iRNA or a plasmid from which an iRNA is transcribed. SNALPs are described, e.g., in U.S. Patent Application Publication Nos. 20060240093, 20070135372, and in International Application No. WO 2009082817. These applications are incorporated herein by reference in their entirety.

[0048] “Introducing into a cell,” when referring to an iRNA, means facilitating or effecting uptake or absorption into the cell, as is understood by those skilled in the art. Absorption or uptake of an iRNA can occur through unaided diffusive or active cellular processes, or by auxiliary agents or devices. The meaning of this term is not limited to cells in vitro; an iRNA may also be “introduced into a cell,” wherein the cell is part of a living organism. In such an instance, introduction into the cell will include the delivery to the organism. For example, for in vivo delivery, iRNA can be injected into a tissue site or administered systemically. In vivo delivery can also be by a beta-glucan delivery system, such as those described in U.S. Pat. Nos. 5,032,401 and 5,607,677, and U.S. Publication No. 2005/0281781, which are hereby incorporated by reference in their entirety. In vitro introduction into a cell includes methods known in the art such as electroporation and lipofection. Further approaches are described herein below or known in the art.

[0049] As used herein, the term “modulate the expression of,” refers to at an least partial “inhibition” or partial “activation” of target gene expression in a cell treated with an iRNA composition as described herein compared to the expression of the target gene in an untreated cell.

[0050] The terms “activate,” “enhance,” “up-regulate the expression of,” “increase the expression of,” and the like, in so far as they refer to a target gene, herein refer to the at least partial activation of the expression of a target gene, as manifested by an increase in the amount of target mRNA, which may be isolated from or detected in a first cell or group of cells in which a target gene is transcribed and which has or have been treated such that the expression of a target gene is increased, as compared to a second cell or group of cells substantially identical to the first cell or group of cells but which has or have not been so treated (control cells).

[0051] In one embodiment, expression of a target gene is activated by at least about 10%, 15%, 20%, 25%, 30%, 35%, 40%, 45%, or 50% by administration of an iRNA as described herein. In some embodiments, a target gene is activated by at least about 60%, 70%, or 80% by administration of an iRNA featured in the invention. In some embodiments, expression of a target gene is activated by at least about 85%, 90%, or 95% or more by administration of an iRNA as described herein. In some embodiments, the target gene expression is increased by at least 1-fold, at least 2-fold, at least 5-fold, at least 10-fold, at least 50-fold, at least 100-fold, at least 500-fold, at least 1000 fold or more in cells treated with an iRNA as described herein compared to the expression in an untreated cell. Activation of expression by small dsRNAs is described, for example, in Li et al., 2006 Proc. Natl. Acad. Sci. U.S.A. 103:17337-42, and in US20070111963 and US2005226848, each of which is incorporated herein by reference.

[0052] The terms “silence,” “inhibit the expression of,” “down-regulate the expression of,” “suppress the expression of,” and the like, in so far as they refer to a target gene, herein refer to the at least partial suppression of the expression of a target gene, as manifested by a reduction of the amount of target mRNA which may be isolated from or detected in a first cell or group of cells in which a target gene is transcribed and which has or have been treated such that the expression of target gene is inhibited, as compared to a second cell or group of cells substantially identical to the first cell or group of cells but which has or have not been so treated (control cells). The degree of inhibition is usually expressed in terms of

$$\frac{( mRNA in control cells ) - ( mRNA in treated cells )}{( mRNA in control cells )} \cdot 100 \%$$

[0053] Alternatively, the degree of inhibition may be given in terms of a reduction of a parameter that is functionally linked to target gene expression, e.g., the amount of protein encoded by a target gene, or the number of cells displaying a certain phenotype, e.g., lack of or decreased cytokine production. In principle, target gene silencing may be determined in any cell expressing target, either constitutively or by genomic engineering, and by any appropriate assay. However, when a reference is needed in order to determine whether a given iRNA inhibits the expression of the target gene by a certain degree and therefore is encompassed by the instant invention, the assays provided in the Examples below shall serve as such reference.

[0054] For example, in certain instances, expression of a target gene is suppressed by at least about 10%, 15%, 20%, 25%, 30%, 35%, 40%, 45%, 50%, or 55% by administration of an iRNA featured in the invention. In some embodiments, a target gene is suppressed by at least about 60%, 65%, 70%, 75%, or 80% by administration of an iRNA featured in the invention. In some embodiments, a target gene is suppressed by at least about 81%, 82%, 83%, 84%, 85%, 86%, 87%, 88%, 89%, 90%, 91%, 92%, 93%, 94%, 95%, 96%, 97%, 98%, 99%, or more by administration of an iRNA as described herein.

[0055] As used herein in the context of target gene expression, the terms “treat,” “treatment,” and the like, refer to relief from or alleviation of pathological processes mediated by target expression. In the context of the present invention insofar as it relates to any of the other conditions recited herein below (other than pathological processes mediated by target expression), the terms “treat,” “treatment,” and the like mean to relieve or alleviate at least one symptom associated with such condition, or to slow or reverse the progression or anticipated progression of such condition.

[0056] By “lower” in the context of a disease marker or symptom is meant a statistically significant decrease in such level. The decrease can be, for example, at least 10%, at least 15%, at least 20%, at least 25%, at least 30%, at least 35%, at least 40% or more, and is preferably down to a level accepted as within the range of normal for an individual without such disorder.

[0057] As used herein, the phrase “therapeutically effective amount” “refers to an amount that provides a therapeutic benefit in the treatment or management of pathological processes mediated by target gene expression, e.g., PCSK9 gene expression, or an overt symptom of pathological processes mediated target gene expression. The phrase “prophylactically effective amount” refer to an amount that provides a therapeutic benefit in the prevention of pathological processes mediated by target gene expression or an overt symptom of pathological processes mediated by target gene expression. The specific amount that is therapeutically effective can be readily determined by an ordinary medical practitioner, and may vary depending on factors known in the art, such as, for example, the type of pathological processes mediated by target gene expression, the patient's history and age, the stage of pathological processes mediated by target gene expression, and the administration of other agents that inhibit pathological processes mediated by target gene expression.

[0058] As used herein, a “pharmaceutical composition” comprises a pharmacologically effective amount of an iRNA and a pharmaceutically acceptable carrier. As used herein, “pharmacologically effective amount,” “therapeutically effective amount” or simply “effective amount” refers to that amount of an iRNA effective to produce the intended pharmacological or therapeutic result. For example, if a given clinical treatment is considered effective when there is at least a 10% reduction in a measurable parameter associated with a disease or disorder, a therapeutically effective amount of a drug for the treatment of that disease or disorder is the amount necessary to effect at least a 10% reduction in that parameter.

[0059] The term “pharmaceutically carrier” refers to a carrier for administration of a therapeutic agent, e.g., a siRNA. Carriers are described in more detail below, and include lipid formulations, e.g., LNP09 and SNALP formulations.

[0060] Double-Stranded Ribonucleic Acid (dsRNA)

[0061] Described herein are siRNAs, e.g., dsRNAs that inhibit the expression of a PCSK9 gene.

[0062] The dsRNA can be synthesized by standard methods known in the art as further discussed below, e.g., by use of an automated DNA synthesizer, such as are commercially available from, for example, Applied Biosystems, Inc. Further descriptions of synthesis are found below and in the examples.

[0063] A dsRNA includes two RNA strands that are sufficiently complementary to hybridize to form a duplex structure under conditions in which the dsRNA will be used. One strand of a dsRNA (the antisense strand) includes a region of complementarity that is substantially complementary, and generally fully complementary, to a target sequence, derived from the sequence of an mRNA formed during the expression of a target gene. The other strand (the sense strand) includes a region that is complementary to the antisense strand, such that the two strands hybridize and form a duplex structure when combined under suitable conditions.

[0064] Where the duplex region is formed from two strands of a single molecule, the molecule can have a duplex region separated by a single stranded chain of nucleotides (herein referred to as a “hairpin loop”) between the 3′-end of one strand and the 5′-end of the respective other strand forming the duplex structure. The hairpin loop can comprise at least one unpaired nucleotide; in some embodiments the hairpin loop can comprise at least 3, at least 4, at least 5, at least 6, at least 7, at least 8, at least 9, at least 10, at least 20, at least 23 or more unpaired nucleotides.

[0065] Where the two substantially complementary strands of a dsRNA are comprised by separate RNA molecules, those molecules need not, but can be covalently connected. Where the two strands are connected covalently by means other than a hairpin loop, the connecting structure is referred to as a “linker.”

[0066] Generally, the duplex structure of the siRNA, e.g., dsRNA, is between 15 and 30 inclusive, more generally between 18 and 25 inclusive, yet more generally between 19 and 24 inclusive, and most generally between 19 and 21 base pairs in length, inclusive. Considering a duplex between 9 and 36 base pairs, the duplex can be any length in this range, for example, 9, 10, 11, 12, 13, 14, 15, 16, 17, 18, 19, 20, 21, 22, 23, 24, 25, 26, 27, 28, 29, 30, 31, 32, 33, 34, 35, or 36 and any sub-range therein between, including, but not limited to 15-30 base pairs, 15-26 base pairs, 15-23 base pairs, 15-22 base pairs, 15-21 base pairs, 15-20 base pairs, 15-19 base pairs, 15-18 base pairs, 15-17 base pairs, 18-30 base pairs, 18-26 base pairs, 18-23 base pairs, 18-22 base pairs, 18-21 base pairs, 18-20 base pairs, 19-30 base pairs, 19-26 base pairs, 19-23 base pairs, 19-22 base pairs, 19-21 base pairs, 19-20 base pairs, 20-30 base pairs, 20-26 base pairs, 20-25 base pairs, 20-24 base pairs, 20-23 base pairs, 20-22 base pairs, 20-21 base pairs, 21-30 base pairs, 21-26 base pairs, 21-25 base pairs, 21-24 base pairs, 21-23 base pairs, or 21-22 base pairs.

[0067] If a composition includes or a method uses more than one siRNA, each siRNA can have duplex lengths that is identical or that differs.

[0068] The region of complementarity to the target sequence in an siRNA is between 15 and 30 inclusive, more generally between 18 and 25 inclusive, yet more generally between 19 and 24 inclusive, and most generally between 19 and 21 nucleotides in length, inclusive. In some embodiments, the dsRNA is between 15 and 20 nucleotides in length, inclusive, and in other embodiments, the dsRNA is between 25 and 30 nucleotides in length, inclusive. The region of complementarity can be 15, 16, 17, 18, 19, 20, 21, 22, 23, 24, 25, 26, 27, 28, 29, or 30 nucleotides in length. As non-limiting examples, the target sequence can be from 15-30 nucleotides, 15-26 nucleotides, 15-23 nucleotides, 15-22 nucleotides, 15-21 nucleotides, 15-20 nucleotides, 15-19 nucleotides, 15-18 nucleotides, 15-17 nucleotides, 18-30 nucleotides, 18-26 nucleotides, 18-23 nucleotides, 18-22 nucleotides, 18-21 nucleotides, 18-20 nucleotides, 19-30 nucleotides, 19-26 nucleotides, 19-23 nucleotides, 19-22 nucleotides, 19-21 nucleotides, 19-20 nucleotides, 20-30 nucleotides, 20-26 nucleotides, 20-25 nucleotides, 20-24 nucleotides, 20-23 nucleotides, 20-22 nucleotides, 20-21 nucleotides, 21-30 nucleotides, 21-26 nucleotides, 21-25 nucleotides, 21-24 nucleotides, 21-23 nucleotides, or 21-22 nucleotides. In some embodiments the target sequence is 15, 16, 17, 18, 19, 20, 21, 22, 23, 24, or 25 nucleotides.

[0069] If a composition includes or a method uses more than one siRNA, each siRNAcan have are region of complementarity that is identical in length or that differs in length.

[0070] Any of the dsRNA, e.g., siRNA as described herein may include one or more single-stranded nucleotide overhangs. In one embodiment, at least one end of a dsRNA has a single-stranded nucleotide overhang of 1 to 4, or 1 or 2 or 3 or 4 nucleotides. dsRNAs having at least one nucleotide overhang have unexpectedly superior inhibitory properties relative to their blunt-ended counterparts. Generally, the single-stranded overhang is located at the 3′-terminal end of the antisense strand or, alternatively, at the 3′-terminal end of the sense strand. The dsRNA can also have a blunt end, generally located at the 5′-end of the antisense strand. In another embodiment, one or more of the nucleotides in the overhang is replaced with a nucleoside thiophosphate. If a composition includes or a method uses more than one siRNA, each siRNA can have different or identical overhangs as described by location, length, and nucleotide.

[0071] The siRNA targets a first region of a PCSK9 gene. In one embodiment, a PCSK9 gene is a human PCSK9 gene. In another embodiment the PCSK9 gene is a mouse or a rat PCSK9 gene. Exemplary siRNA targeting PCSK9 are described in U.S. patent application Ser. No. 11/746,864 filed on May 10, 2007 (now U.S. Pat. No. 7,605,251) and International Patent Application No. PCT/US2007/068655 filed May 10, 2007 (published as WO 2007/134161). Additional disclosure can be found in U.S. patent application Ser. No. 12/478,452 filed Jun. 4, 2009 (published as US 2010/0010066) and International Patent Application No. PCT/US2009/032743 filed Jan. 30, 2009 (published as WO 2009/134487). The sequences of the target, sense, and antisense strands are incorporated by reference for all purposes.

[0072] Tables 1, 2, 6, and 7 disclose target sequences, sense strand sequences, and antisense strand sequences of PCSK9 targeting siRNA.

[0073] In some embodiments, the composition includes or a method uses more than one siRNA, e.g., a second siRNA. In one embodiment, the second siRNA target a region of PCSK9 that is different from the region targeted by the first siRNA.

[0074] Alternatively, the second siRNA targets a different second gene. Examples include genes that interact with PCSK9 and/or are involved with lipid metabolism or cholesterol metabolism. For example, the second target gene can be XBP-1, PCSK5, ApoC3, SCAP, MIG12, HMG CoA Reductase, or IDOL (Inducible Degrader of the LDLR) and the like. In one embodiment, the second gene is a human gene. In another embodiment the second gene is a mouse or a rat gene.

[0075] In one embodiment, the second siRNA targets the XBP-1 gene. Exemplary siRNA targeting XBP-1 can be found in U.S. patent application Ser. No. 12/425,811 filed Apr. 17, 2009 (published as US 2009-0275638). The sequences of the target, sense, and antisense strands are incorporated by reference for all purposes.

[0076] Additional dsRNA

[0077] A dsRNAs having a partial sequence of at least 15, 16, 17, 18, 19, 20, or more contiguous nucleotides from one of the sequences in Tables 1, 2, 6, and 7, and differing in their ability to inhibit the expression of a target gene by not more than 5, 10, 15, 20, 25, or 30% inhibition from a dsRNA comprising the full sequence, are contemplated according to the invention.

[0078] In addition, the RNAs provided in Tables 1, 2, 6, and 7 identify a site in the target gene transcript that is susceptible to RISC-mediated cleavage. As such, the present invention further features iRNAs that target within one of such sequences. As used herein, an iRNA is said to target within a particular site of an RNA transcript if the iRNA promotes cleavage of the transcript anywhere within that particular site. Such an iRNA will generally include at least 15 contiguous nucleotides from one of the sequences provided herein coupled to additional nucleotide sequences taken from the region contiguous to the selected sequence in a target gene.

[0079] While a target sequence is generally 15-30 nucleotides in length, there is wide variation in the suitability of particular sequences in this range for directing cleavage of any given target RNA. Various software packages and the guidelines set out herein provide guidance for the identification of optimal target sequences for any given gene target, but an empirical approach can also be taken in which a “window” or “mask” of a given size (as a non-limiting example, 21 nucleotides) is literally or figuratively (including, e.g., in silico) placed on the target RNA sequence to identify sequences in the size range that may serve as target sequences. By moving the sequence “window” progressively one nucleotide upstream or downstream of an initial target sequence location, the next potential target sequence can be identified, until the complete set of possible sequences is identified for any given target size selected. This process, coupled with systematic synthesis and testing of the identified sequences (using assays as described herein or as known in the art) to identify those sequences that perform optimally can identify those RNA sequences that, when targeted with an iRNA agent, mediate the best inhibition of target gene expression. Thus, while the sequences identified, for example, above represent effective target sequences, it is contemplated that further optimization of inhibition efficiency can be achieved by progressively “walking the window” one nucleotide upstream or downstream of the given sequences to identify sequences with equal or better inhibition characteristics.

[0080] Further, it is contemplated that for any sequence identified, e.g., in Tables 1, 2, 6, and 7, further optimization could be achieved by systematically either adding or removing nucleotides to generate longer or shorter sequences and testing those and sequences generated by walking a window of the longer or shorter size up or down the target RNA from that point. Again, coupling this approach to generating new candidate targets with testing for effectiveness of iRNAs based on those target sequences in an inhibition assay as known in the art or as described herein can lead to further improvements in the efficiency of inhibition. Further still, such optimized sequences can be adjusted by, e.g., the introduction of modified nucleotides as described herein or as known in the art, addition or changes in overhang, or other modifications as known in the art and/or discussed herein to further optimize the molecule (e.g., increasing serum stability or circulating half-life, increasing thermal stability, enhancing transmembrane delivery, targeting to a particular location or cell type, increasing interaction with silencing pathway enzymes, increasing release from endosomes, etc.) as an expression inhibitor.

[0081] An iRNA as described in Tables 1, 2, 6, and 7 can contain one or more mismatches to the target sequence. In one embodiment, an iRNA as described in Tables 1, 2, 6, and 7 contains no more than 3 mismatches. If the antisense strand of the iRNA contains mismatches to a target sequence, it is preferable that the area of mismatch not be located in the center of the region of complementarity. If the antisense strand of the iRNA contains mismatches to the target sequence, it is preferable that the mismatch be restricted to be within the last 5 nucleotides from either the 5′ or 3′ end of the region of complementarity. For example, for a 23 nucleotide iRNA agent RNA strand which is complementary to a region of a PCSK9 gene, the RNA strand generally does not contain any mismatch within the central 13 nucleotides. The methods described herein or methods known in the art can be used to determine whether an iRNA containing a mismatch to a target sequence is effective in inhibiting the expression of a PCSK9 gene. Consideration of the efficacy of iRNAs with mismatches in inhibiting expression of a PCSK9 gene is important, especially if the particular region of complementarity in a PCSK9 gene is known to have polymorphic sequence variation within the population.

[0082] Covalent Linkage

[0083] In some embodiments, the composition includes or a method uses more than one siRNA, e.g., a second siRNA. Thetwo siRNAs can be joined via a covalent linker Covalent linkers are well-known to one of skill in the art and include, e.g., a nucleic acid linker, a peptide linker, and the like.

[0084] The covalent linker joins the two siRNAs. The covalent linker can join two sense strands, two antisense strands, one sense and one antisense strand, two sense strands and one antisense strand, two antisense strands and one sense strand, or two sense and two antisense strands.

[0085] The covalent linker can include RNA and/or DNA and/or a peptide. The linker can be single stranded, double stranded, partially single strands, or partially double stranded. In some embodiments the linker includes a disulfide bond. The linker can be cleavable or non-cleavable.

[0086] The covalent linker can be, e.g., dTsdTuu=(5′-2′ deoxythymidyl-3′-thiophosphate-5′-2′ deoxythymidyl-3′-phosphate-5′-uridyl-3′-phosphate-5′-uridyl-3′-phosphate); rUsrU (a thiophosphate linker: 5′-uridyl-3′-thiophosphate-5′-uridyl-3′-phosphate); an rUrU linker; dTsdTaa (aadTsdT, 5′-2′ deoxythymidyl-3′-thiophosphate-5′-2′ deoxythymidyl-3′-phosphate-5′-adenyl-3′-phosphate-5′-adenyl-3′-phosphate); dTsdT (5′-2′ deoxythyrnidyl-3′-thiophosphate-5′-2′deoxythymidyl-3′-phosphate); dTsdTuu=uudTsdT=5′-2′ deoxythymidyl-3′-thiophosphate-5′-2′ deoxythymidyl-3′-phosphate-5′-uridyl-3′-phosphate-5′-uridyl-3′-phosphate.

[0087] The covalent linker can be a polyRNA, such as poly(5′-adenyl-3′-phosphate—AAAAAAAA) or poly(5′-cytidyl-3′-phosphate-5′-uridyl-3′-phosphate—CUCUCUCU)), e.g., Xₙ single stranded poly RNA linker wherein n is an integer from 2-50 inclusive, preferable 4-15 inclusive, most preferably 7-8 inclusive. Modified nucleotides or a mixture of nucleotides can also be present in said polyRNA linker. The covalent linker can be a polyDNA, such as poly(5′-2′ deoxythymidyl-3′-phosphate—TTTTTTTT), e.g., wherein n is an integer from 2-50 inclusive, preferable 4-15 inclusive, most preferably 7-8 inclusive.

[0088] Modified nucleotides or a mixture of nucleotides can also be present in said polyDNA linker. a single stranded polyDNA linker wherein n is an integer from 2-50 inclusive, preferable 4-15 inclusive, most preferably 7-8 inclusive. Modified nucleotides or a mixture of nucleotides can also be present in said polyDNA linker.

[0089] The covalent linker can include a disulfide bond, optionally a bis-hexyl-disulfide linker. In one embodiment, the disulfide linker is

[chemical structure]

[0090] The covalent linker can include a peptide bond, e.g., include amino acids. In one embodiment, the covalent linker is a 1-10 amino acid long linker, preferably comprising 4-5 amino acids, optionally X-Gly-Phe-Gly-Y wherein X and Y represent any amino acid.

[0091] The covalent linker can include HEG, a hexaethylenglycol linker.

### MODIFICATIONS

[0092] In yet another embodiment, an siRNA is chemically modified to enhance stability or other beneficial characteristics. The nucleic acids featured in the invention may be synthesized and/or modified by methods well established in the art, such as those described in “Current protocols in nucleic acid chemistry,” Beaucage, S. L. et al. (Edrs.), John Wiley & Sons, Inc., New York, N.Y., USA, which is hereby incorporated herein by reference. Modifications include, for example, (a) end modifications, e.g., 5′ end modifications (phosphorylation, conjugation, inverted linkages, etc.) 3′ end modifications (conjugation, DNA nucleotides, inverted linkages, etc.), (b) base modifications, e.g., replacement with stabilizing bases, destabilizing bases, or bases that base pair with an expanded repertoire of partners, removal of bases (abasic nucleotides), or conjugated bases, (c) sugar modifications (e.g., at the 2′ position or 4′ position) or replacement of the sugar, as well as (d) backbone modifications, including modification or replacement of the phosphodiester linkages. Specific examples of RNA compounds useful in this invention include, but are not limited to RNAs containing modified backbones or no natural internucleoside linkages. RNAs having modified backbones include, among others, those that do not have a phosphorus atom in the backbone. For the purposes of this specification, and as sometimes referenced in the art, modified RNAs that do not have a phosphorus atom in their internucleoside backbone can also be considered to be oligonucleosides. In particular embodiments, the modified RNA will have a phosphorus atom in its internucleoside backbone.

[0093] Modified RNA backbones include, for example, phosphorothioates, chiral phosphorothioates, phosphorodithioates, phosphotriesters, aminoalkylphosphotriesters, methyl and other alkyl phosphonates including 3′-alkylene phosphonates and chiral phosphonates, phosphinates, phosphoramidates including 3′-amino phosphoramidate and aminoalkylphosphoramidates, thionophosphoramidates, thionoalkylphosphonates, thionoalkylphosphotriesters, and boranophosphates having normal 3′-5′ linkages, 2′-5′ linked analogs of these, and those) having inverted polarity wherein the adjacent pairs of nucleoside units are linked 3′-5′ to 5′-3′ or 2′-5′ to 5′-2′. Various salts, mixed salts and free acid forms are also included.

[0094] Representative U.S. patents that teach the preparation of the above phosphorus-containing linkages include, but are not limited to, U.S. Pat. Nos. 3,687,808; 4,469,863; 4,476,301; 5,023,243; 5,177,195; 5,188,897; 5,264,423; 5,276,019; 5,278,302; 5,286,717; 5,321,131; 5,399,676; 5,405,939; 5,453,496; 5,455,233; 5,466,677; 5,476,925; 5,519,126; 5,536,821; 5,541,316; 5,550,111; 5,563,253; 5,571,799; 5,587,361; 5,625,050; 6,028,188; 6,124,445; 6,160,109; 6,169,170; 6,172,209; 6,239,265; 6,277,603; 6,326,199; 6,346,614; 6,444,423; 6,531,590; 6,534,639; 6,608,035; 6,683,167; 6,858,715; 6,867,294; 6,878,805; 7,015,315; 7,041,816; 7,273,933; 7,321,029; and U.S. Pat. RE39464, each of which is herein incorporated by reference

[0095] Modified RNA backbones that do not include a phosphorus atom therein have backbones that are formed by short chain alkyl or cycloalkyl internucleoside linkages, mixed heteroatoms and alkyl or cycloalkyl internucleoside linkages, or one or more short chain heteroatomic or heterocyclic internucleoside linkages. These include those having morpholino linkages (formed in part from the sugar portion of a nucleoside); siloxane backbones; sulfide, sulfoxide and sulfone backbones; formacetyl and thioformacetyl backbones; methylene formacetyl and thioformacetyl backbones; alkene containing backbones; sulfamate backbones; methyleneimino and methylenehydrazino backbones; sulfonate and sulfonamide backbones; amide backbones; and others having mixed N, O, S and CH₂ component parts.

[0096] Representative U.S. patents that teach the preparation of the above oligonucleosides include, but are not limited to, U.S. Pat. Nos. 5,034,506; 5,166,315; 5,185,444; 5,214,134; 5,216,141; 5,235,033; 5,64,562; 5,264,564; 5,405,938; 5,434,257; 5,466,677; 5,470,967; 5,489,677; 5,541,307; 5,561,225; 5,596,086; 5,602,240; 5,608,046; 5,610,289; 5,618,704; 5,623,070; 5,663,312; 5,633,360; 5,677,437; and, 5,677,439, each of which is herein incorporated by reference.

[0097] In other RNA mimetics suitable or contemplated for use in iRNAs, both the sugar and the internucleoside linkage, i.e., the backbone, of the nucleotide units are replaced with novel groups. The base units are maintained for hybridization with an appropriate nucleic acid target compound. One such oligomeric compound, an RNA mimetic that has been shown to have excellent hybridization properties, is referred to as a peptide nucleic acid (PNA). In PNA compounds, the sugar backbone of an RNA is replaced with an amide containing backbone, in particular an aminoethylglycine backbone. The nucleobases are retained and are bound directly or indirectly to aza nitrogen atoms of the amide portion of the backbone. Representative U.S. patents that teach the preparation of PNA compounds include, but are not limited to, U.S. Pat. Nos. 5,539,082; 5,714,331; and 5,719,262, each of which is herein incorporated by reference. Further teaching of PNA compounds can be found, for example, in Nielsen et al., Science, 1991, 254, 1497-1500.

[0098] Some embodiments featured in the invention include RNAs with phosphorothioate backbones and oligonucleosides with heteroatom backbones, and in particular—CH₂—NH—CH₂—, —CH₂—N(CH₃)—O—CH₂—[known as a methylene (methylimino) or MMI backbone], —CH₂—O—N(CH₃)—CH₂—, —CH₂—N(CH₃)—N(CH₃)—CH₂— and —N(CH₃)—CH₂—CH₂—[wherein the native phosphodiester backbone is represented as —O—P—O—CH₂—] of the above-referenced U.S. Pat. No. 5,489,677, and the amide backbones of the above-referenced U.S. Pat. No. 5,602,240. In some embodiments, the RNAs featured herein have morpholino backbone structures of the above-referenced U.S. Pat. No. 5,034,506.

[0099] Modified RNAs may also contain one or more substituted sugar moieties. The iRNAs, e.g., dsRNAs, featured herein can include one of the following at the 2′ position: OH; F; O-, S-, or N-alkyl; O-, S-, or N-alkenyl; O-, S- or N-alkynyl; or O-alkyl-O-alkyl, wherein the alkyl, alkenyl and alkynyl may be substituted or unsubstituted C₁ to C₁₀ alkyl or C₂ to C₁₀ alkenyl and alkynyl. Exemplary suitable modifications include O[(CH₂)ₙO]ₘCH₃, O(CH₂).ₙOCH₃, O(CH₂)ₙNH₂, O(CH₂)ₙCH₃, O(CH₂)ₙONH₂, and O(CH₂)ₙON[(CH₂)ₙCH₃)]₂, where n and m are from 1 to about 10. In other embodiments, dsRNAs include one of the following at the 2′ position: C₁ to C₁₀ lower alkyl, substituted lower alkyl, alkaryl, aralkyl, O-alkaryl or O-aralkyl, SH, SCH₃, OCN, Cl, Br, CN, CF₃, OCF₃, SOCH₃, SO₂CH₃, ONO₂, NO₂, N₃, NH₂, heterocycloalkyl, heterocycloalkaryl, aminoalkylamino, polyalkylamino, substituted silyl, an RNA cleaving group, a reporter group, an intercalator, a group for improving the pharmacokinetic properties of an iRNA, or a group for improving the pharmacodynamic properties of an iRNA, and other substituents having similar properties. In some embodiments, the modification includes a 2′-methoxyethoxy (2′-O—CH₂CH₂OCH₃, also known as 2′-O-(2-methoxyethyl) or 2′-MOE) (Martin et al., Helv. Chim. Acta, 1995, 78:486-504) i.e., an alkoxy-alkoxy group. Another exemplary modification is 2′-dimethylaminooxyethoxy, i.e., a O(CH₂)₂ON(CH₃)₂ group, also known as 2′-DMAOE, as described in examples herein below, and 2′-dimethylaminoethoxyethoxy (also known in the art as 2′-O-dimethylaminoethoxyethyl or 2′-DMAEOE), i.e., 2′-O—CH₂—O—CH₂—N(CH₂)₂, also described in examples herein below.

[0100] Other modifications include 2′-methoxy (2′-OCH₃), 2′-aminopropoxy (2′-OCH₂CH₂CH₂NH₂) and 2′-fluoro (2′-F). Similar modifications may also be made at other positions on the RNA of an iRNA, particularly the 3′ position of the sugar on the 3′ terminal nucleotide or in 2′-5′ linked dsRNAs and the 5′ position of 5′ terminal nucleotide. iRNAs may also have sugar mimetics such as cyclobutyl moieties in place of the pentofuranosyl sugar. Representative U.S. patents that teach the preparation of such modified sugar structures include, but are not limited to, U.S. Pat. Nos. 4,981,957; 5,118,800; 5,319,080; 5,359,044; 5,393,878; 5,446,137; 5,466,786; 5,514,785; 5,519,134; 5,567,811; 5,576,427; 5,591,722; 5,597,909; 5,610,300; 5,627,053; 5,639,873; 5,646,265; 5,658,873; 5,670,633; and 5,700,920, certain of which are commonly owned with the instant application, and each of which is herein incorporated by reference.

[0101] An iRNA may also include nucleobase (often referred to in the art simply as “base”) modifications or substitutions. As used herein, “unmodified” or “natural” nucleobases include the purine bases adenine (A) and guanine (G), and the pyrimidine bases thymine (T), cytosine (C) and uracil (U). Modified nucleobases include other synthetic and natural nucleobases such as 5-methylcytosine (5-me-C), 5-hydroxymethyl cytosine, xanthine, hypoxanthine, 2-aminoadenine, 6-methyl and other alkyl derivatives of adenine and guanine, 2-propyl and other alkyl derivatives of adenine and guanine, 2-thiouracil, 2-thiothymine and 2-thiocytosine, 5-halouracil and cytosine, 5-propynyl uracil and cytosine, 6-azo uracil, cytosine and thymine, 5-uracil (pseudouracil), 4-thiouracil, 8-halo, 8-amino, 8-thiol, 8-thioalkyl, 8-hydroxyl anal other 8-substituted adenines and guanines, 5-halo, particularly 5-bromo, 5-trifluoromethyl and other 5-substituted uracils and cytosines, 7-methylguanine and 7-methyladenine, 8-azaguanine and 8-azaadenine, 7-deazaguanine and 7-daazaadenine and 3-deazaguanine and 3-deazaadenine. Further nucleobases include those disclosed in U.S. Pat. No. 3,687,808, those disclosed in Modified Nucleosides in Biochemistry, Biotechnology and Medicine, Herdewijn, P. ed. Wiley-VCH, 2008; those disclosed in The Concise Encyclopedia Of Polymer Science And Engineering, pages 858-859, Kroschwitz, J. L, ed. John Wiley & Sons, 1990, these disclosed by Englisch et al., Angewandte Chemie, International Edition, 1991, 30, 613, and those disclosed by Sanghvi, Y S., Chapter 15, dsRNA Research and Applications, pages 289-302, Crooke, S. T. and Lebleu, B., Ed., CRC Press, 1993. Certain of these nucleobases are particularly useful for increasing the binding affinity of the oligomeric compounds featured in the invention. These include 5-substituted pyrimidines, 6-azapyrimidines and N-2, N-6 and 0-6 substituted purines, including 2-aminopropyladenine, 5-propynyluracil and 5-propynylcytosine. 5-methylcytosine substitutions have been shown to increase nucleic acid duplex stability by 0.6-1.2° C. (Sanghvi, Y. S., Crooke, S. T. and Lebleu, B., Eds., dsRNA Research and Applications, CRC Press, Boca Raton, 1993, pp. 276-278) and are exemplary base substitutions, even more particularly when combined with 2′-O-methoxyethyl sugar modifications.

[0102] Representative U.S. patents that teach the preparation of certain of the above noted modified nucleobases as well as other modified nucleobases include, but are not limited to, the above noted U.S. Pat. No. 3,687,808, as well as U.S. Pat. Nos. 4,845,205; 5,130,30; 5,134,066; 5,175,273; 5,367,066; 5,432,272; 5,457,187; 5,459,255; 5,484,908; 5,502,177; 5,525,711; 5,552,540; 5,587,469; 5,594,121, 5,596,091; 5,614,617; 5,681,941; 6,015,886; 6,147,200; 6,166,197; 6,222,025; 6,235,887; 6,380,368; 6,528,640; 6,639,062; 6,617,438; 7,045,610; 7,427,672; and 7,495,088, each of which is herein incorporated by reference, and U.S. Pat. No. 5,750,692, also herein incorporated by reference.

[0103] The RNA of an iRNA can also be modified to include one or more locked nucleic acids (LNA). A locked nucleic acid is a nucleotide having a modified ribose moiety in which the ribose moiety comprises an extra bridge connecting the 2′ and 4′ carbons. This structure effectively “locks” the ribose in the 3′-endo structural conformation. The addition of locked nucleic acids to siRNAs has been shown to increase siRNA stability in serum, and to reduce off-target effects (Elmen, J. et al., (2005) Nucleic Acids Research 33(1):439-447; Mook, O R. et al., (2007) Mol Canc Ther 6(3):833-843; Grunweller, A. et al., (2003) Nucleic Acids Research 31(12):3185-3193).

[0104] Representative U.S. patents that teach the preparation of locked nucleic acid nucleotides include, but are not limited to, the following: U.S. Pat. Nos. 6,268,490; 6,670,461; 6,794,499; 6,998,484; 7,053,207; 7,084,125; and 7,399,845, each of which is herein incorporated by reference in its entirety.

[0105] Potentially stabilizing modifications to the ends of RNA molecules can include N-(acetylaminocaproyl)-4-hydroxyprolinol (Hyp-C6—NHAc), N-(caproyl-4-hydroxyprolinol (Hyp-C6), N-(acetyl-4-hydroxyprolinol (Hyp-NHAc), thymidine-2′-O-deoxythymidine (ether), N-(aminocaproyl)-4-hydroxyprolinol (Hyp-C6-amino), 22-docosanoyl-uridine-3′-phosphate, inverted base dT(idT) and others. Disclosure of this modification can be found in U.S. Provisional Patent Application No. 61/223,665 (“the '665 application”), filed Jul. 7, 2009, entitled “Oligonucleotide End Caps” and International patent application no. PCT/US10/41214, filed Jul. 7, 2010.

[0106] Ligands

[0107] Another modification of an siRNA of the invention involves chemically linking to the RNA one or more ligands, moieties or conjugates that enhance the activity, cellular distribution or cellular uptake of the iRNA. Such moieties include but are not limited to lipid moieties such as a cholesterol moiety (Letsinger et al., Proc. Natl. Acid. Sci. USA, 1989, 86: 6553-6556), cholic acid (Manoharan et al., Biorg. Med. Chem. Let., 1994, 4:1053-1060), a thioether, e.g., beryl-5-tritylthiol (Manoharan et al., Ann. N.Y. Acad. Sci., 1992, 660:306-309; Manoharan et al., Biorg. Med. Chem. Let., 1993, 3:2765-2770), a thiocholesterol (Oberhauser et al., Nucl. Acids Res., 1992, 20:533-538), an aliphatic chain, e.g., dodecandiol or undecyl residues (Saison-Behmoaras et al., EMBO J, 1991, 10:1111-1118; Kabanov et al., FEBS Lett., 1990, 259:327-330; Svinarchuk et al., Biochimie, 1993, 75:49-54), a phospholipid, e.g., di-hexadecyl-rac-glycerol or triethyl-ammonium 1,2-di-O-hexadecyl-rac-glycero-3-phosphonate (Manoharan et al., Tetrahedron Lett., 1995, 36:3651-3654; Shea et al., Nucl. Acids Res., 1990, 18:3777-3783), a polyamine or a polyethylene glycol chain (Manoharan et al., Nucleosides & Nucleotides, 1995, 14:969-973), or adamantane acetic acid (Manoharan et al., Tetrahedron Lett., 1995, 36:3651-3654), a palmityl moiety (Mishra et al., Biochim. Biophys. Acta, 1995, 1264:229-237), or an octadecylamine or hexylamino-carbonyloxycholesterol moiety (Crooke et al., J. Pharmacol. Exp. Ther., 1996, 277:923-937).

[0108] In one embodiment, a ligand alters the distribution, targeting or lifetime of an iRNA agent into which it is incorporated. In preferred embodiments a ligand provides an enhanced affinity for a selected target, e.g., molecule, cell or cell type, compartment, e.g., a cellular or organ compartment, tissue, organ or region of the body, as, e.g., compared to a species absent such a ligand. Preferred ligands will not take part in duplex pairing in a duplexed nucleic acid.

[0109] Ligands can include a naturally occurring substance, such as a protein (e.g., human serum albumin (HSA), low-density lipoprotein (LDL), or globulin); carbohydrate (e.g., a dextran, pullulan, chitin, chitosan, inulin, cyclodextrin or hyaluronic acid); or a lipid. The ligand may also be a recombinant or synthetic molecule, such as a synthetic polymer, e.g., a synthetic polyamino acid. Examples of polyamino acids include polyamino acid is a polylysine (PLL), poly L-aspartic acid, poly L-glutamic acid, styrene-maleic acid anhydride copolymer, poly(L-lactide-co-glycolied) copolymer, divinyl ether-maleic anhydride copolymer, N-(2-hydroxypropyl)methacrylamide copolymer (HMPA), polyethylene glycol (PEG), polyvinyl alcohol (PVA), polyurethane, poly(2-ethylacryllic acid), N-isopropylacrylamide polymers, or polyphosphazine. Example of polyamines include: polyethylenimine, polylysine (PLL), spermine, spermidine, polyamine, pseudopeptide-polyamine, peptidomimetic polyamine, dendrimer polyamine, arginine, amidine, protamine, cationic lipid, cationic porphyrin, quaternary salt of a polyamine, or an alpha helical peptide.

[0110] Ligands can also include targeting groups, e.g., a cell or tissue targeting agent, e.g., a lectin, glycoprotein, lipid or protein, e.g., an antibody, that binds to a specified cell type such as a kidney cell. A targeting group can be a thyrotropin, melanotropin, lectin, glycoprotein, surfactant protein A, Mucin carbohydrate, multivalent lactose, multivalent galactose, N-acetyl-galactosamine, N-acetyl-gulucosamine multivalent mannose, multivalent fucose, glycosylated polyaminoacids, multivalent galactose, transferrin, bisphosphonate, polyglutamate, polyaspartate, a lipid, cholesterol, a steroid, bile acid, folate, vitamin B12, biotin, or an RGD peptide or RGD peptide mimetic.

[0111] Other examples of ligands include dyes, intercalating agents (e.g. acridines), cross-linkers (e.g. psoralene, mitomycin C), porphyrins (TPPC4, texaphyrin, Sapphyrin), polycyclic aromatic hydrocarbons (e.g., phenazine, dihydrophenazine), artificial endonucleases (e.g. EDTA), lipophilic molecules, e.g., cholesterol, cholic acid, adamantane acetic acid, 1-pyrene butyric acid, dihydrotestosterone, 1,3-Bis-O(hexadecyl)glycerol, geranyloxyhexyl group, hexadecylglycerol, borneol, menthol, 1,3-propanediol, heptadecyl group, palmitic acid, myristic acid, O3-(oleoyl)lithocholic acid, O3-(oleoyl)cholenic acid, dimethoxytrityl, or phenoxazine) and peptide conjugates (e.g., antennapedia peptide, Tat peptide), alkylating agents, phosphate, amino, mercapto, PEG (e.g., PEG-40K), MPEG, [MPEG]₂, polyamino, alkyl, substituted alkyl, radiolabeled markers, enzymes, haptens (e.g. biotin), transport/absorption facilitators (e.g., aspirin, vitamin E, folic acid), synthetic ribonucleases (e.g., imidazole, bisimidazole, histamine, imidazole clusters, acridine-imidazole conjugates, Eu3+ complexes of tetraazamacrocycles), dinitrophenyl, HRP, or AP.

[0112] Ligands can be proteins, e.g., glycoproteins, or peptides, e.g., molecules having a specific affinity for a co-ligand, or antibodies e.g., an antibody, that binds to a specified cell type such as a cancer cell, endothelial cell, or bone cell. Ligands may also include hormones and hormone receptors. They can also include non-peptidic species, such as lipids, lectins, carbohydrates, vitamins, cofactors, multivalent lactose, multivalent galactose, N-acetyl-galactosamine, N-acetyl-gulucosamine multivalent mannose, or multivalent fucose. The ligand can be, for example, a lipopolysaccharide, an activator of p38 MAP kinase, or an activator of NF-κB.

[0113] The ligand can be a substance, e.g., a drug, which can increase the uptake of the iRNA agent into the cell, for example, by disrupting the cell's cytoskeleton, e.g., by disrupting the cell's microtubules, microfilaments, and/or intermediate filaments. The drug can be, for example, taxon, vincristine, vinblastine, cytochalasin, nocodazole, japlakinolide, latrunculin A, phalloidin, swinholide A, indanocine, or myoservin.

[0114] In one ligand, the ligand is a lipid or lipid-based molecule. Such a lipid or lipid-based molecule preferably binds a serum protein, e.g., human serum albumin (HSA). An HSA binding ligand allows for distribution of the conjugate to a target tissue, e.g., a non-kidney target tissue of the body. For example, the target tissue can be the liver, including parenchymal cells of the liver. Other molecules that can bind HSA can also be used as ligands. For example, neproxin or aspirin can be used. A lipid or lipid-based ligand can (a) increase resistance to degradation of the conjugate, (b) increase targeting or transport into a target cell or cell membrane, and/or (c) can be used to adjust binding to a serum protein, e.g., HSA.

[0115] A lipid based ligand can be used to modulate, e.g., control the binding of the conjugate to a target tissue. For example, a lipid or lipid-based ligand that binds to HSA more strongly will be less likely to be targeted to the kidney and therefore less likely to be cleared from the body. A lipid or lipid-based ligand that binds to HSA less strongly can be used to target the conjugate to the kidney.

[0116] In a preferred embodiment, the lipid based ligand binds HSA. Preferably, it binds HSA with a sufficient affinity such that the conjugate will be preferably distributed to a non-kidney tissue. However, it is preferred that the affinity not be so strong that the HSA-ligand binding cannot be reversed.

[0117] In another preferred embodiment, the lipid based ligand binds HSA weakly or not at all, such that the conjugate will be preferably distributed to the kidney. Other moieties that target to kidney cells can also be used in place of or in addition to the lipid based ligand.

[0118] In another aspect, the ligand is a moiety, e.g., a vitamin, which is taken up by a target cell, e.g., a proliferating cell. These are particularly useful for treating disorders characterized by unwanted cell proliferation, e.g., of the malignant or non-malignant type, e.g., cancer cells. Exemplary vitamins include vitamin A, E, and K. Other exemplary vitamins include are B vitamin, e.g., folic acid, B12, riboflavin, biotin, pyridoxal or other vitamins or nutrients taken up by cancer cells. Also included are HSA and low density lipoprotein (LDL).

[0119] In another aspect, the ligand is a cell-permeation agent, preferably a helical cell-permeation agent. Preferably, the agent is amphipathic. An exemplary agent is a peptide such as tat or antennopedia. If the agent is a peptide, it can be modified, including a peptidylmimetic, invertomers, non-peptide or pseudo-peptide linkages, and use of D-amino acids. The helical agent is preferably an alpha-helical agent, which preferably has a lipophilic and a lipophobic phase.

[0120] The ligand can be a peptide or peptidomimetic. A peptidomimetic (also referred to herein as an oligopeptidomimetic) is a molecule capable of folding into a defined three-dimensional structure similar to a natural peptide. The attachment of peptide and peptidomimetics to iRNA agents can affect pharmacokinetic distribution of the iRNA, such as by enhancing cellular recognition and absorption. The peptide or peptidomimetic moiety can be about 5-50 amino acids long, e.g., about 5, 10, 15, 20, 25, 30, 35, 40, 45, or 50 amino acids long.

[0121] A peptide or peptidomimetic can be, for example, a cell permeation peptide, cationic peptide, amphipathic peptide, or hydrophobic peptide (e.g., consisting primarily of Tyr, Trp or Phe). The peptide moiety can be a dendrimer peptide, constrained peptide or crosslinked peptide. In another alternative, the peptide moiety can include a hydrophobic membrane translocation sequence (MTS). An exemplary hydrophobic MTS-containing peptide is RFGF having the amino acid sequence AAVALLPAVLLALLAP (SEQ ID NO:1). An RFGF analogue (e.g., amino acid sequence AALLPVLLAAP (SEQ ID NO:2)) containing a hydrophobic MTS can also be a targeting moiety. The peptide moiety can be a “delivery” peptide, which can carry large polar molecules including peptides, oligonucleotides, and protein across cell membranes. For example, sequences from the HIV Tat protein (GRKKRRQRRRPPQ (SEQ ID NO:3)) and the Drosophila Antennapedia protein (RQIKIWFQNRRMKWKK (SEQ ID NO: 4)) have been found to be capable of functioning as delivery peptides. A peptide or peptidomimetic can be encoded by a random sequence of DNA, such as a peptide identified from a phage-display library, or one-bead-one-compound (OBOC) combinatorial library (Lam et al., Nature, 354:82-84, 1991). Preferably the peptide or peptidomimetic tethered to a dsRNA agent via an incorporated monomer unit is a cell targeting peptide such as an arginine-glycine-aspartic acid (RGD)-peptide, or RGD mimic. A peptide moiety can range in length from about 5 amino acids to about 40 amino acids. The peptide moieties can have a structural modification, such as to increase stability or direct conformational properties. Any of the structural modifications described below can be utilized.

[0122] An RGD peptide moiety can be used to target a tumor cell, such as an endothelial tumor cell or a breast cancer tumor cell (Zitzmann et al., Cancer Res., 62:5139-43, 2002). An RGD peptide can facilitate targeting of an dsRNA agent to tumors of a variety of other tissues, including the lung, kidney, spleen, or liver (Aoki et al., Cancer Gene Therapy 8:783-787, 2001). Preferably, the RGD peptide will facilitate targeting of an iRNA agent to the kidney. The RGD peptide can be linear or cyclic, and can be modified, e.g., glycosylated or methylated to facilitate targeting to specific tissues. For example, a glycosylated RGD peptide can deliver a iRNA agent to a tumor cell expressing αᵥβ₃ (Haubner et al., Jour. Nucl. Med., 42:326-336, 2001).

[0123] A “cell permeation peptide” is capable of permeating a cell, e.g., a microbial cell, such as a bacterial or fungal cell, or a mammalian cell, such as a human cell. A microbial cell-permeating peptide can be, for example, an α-helical linear peptide (e.g., LL-37 or Ceropin P1), a disulfide bond-containing peptide (e.g., α-defensin, β-defensin or bactenecin), or a peptide containing only one or two dominating amino acids (e.g., PR-39 or indolicidin). A cell permeation peptide can also include a nuclear localization signal (NLS). For example, a cell permeation peptide can be a bipartite amphipathic peptide, such as MPG, which is derived from the fusion peptide domain of HIV-1 gp41 and the NLS of SV40 large T antigen (Simeoni et al., Nucl. Acids Res. 31:2717-2724, 2003).

[0124] Representative U.S. patents that teach the preparation of RNA conjugates include, but are not limited to, U.S. Pat. Nos. 4,828,979; 4,948,882; 5,218,105; 5,525,465; 5,541,313; 5,545,730; 5,552,538; 5,578,717, 5,580,731; 5,591,584; 5,109,124; 5,118,802; 5,138,045; 5,414,077; 5,486,603; 5,512,439; 5,578,718; 5,608,046; 4,587,044; 4,605,735; 4,667,025; 4,762,779; 4,789,737; 4,824,941; 4,835,263; 4,876,335; 4,904,582; 4,958,013; 5,082,830; 5,112,963; 5,214,136; 5,082,830; 5,112,963; 5,214,136; 5,245,022; 5,254,469; 5,258,506; 5,262,536; 5,272,250; 5,292,873; 5,317,098; 5,371,241, 5,391,723; 5,416,203, 5,451,463; 5,510,475; 5,512,667; 5,514,785; 5,565,552; 5,567,810; 5,574,142; 5,585,481; 5,587,371; 5,595,726; 5,597,696; 5,599,923; 5,599,928 and 5,688,941; 6,294,664; 6,320,017; 6,576,752; 6,783,931; 6,900,297; 7,037,646; each of which is herein incorporated by reference.

[0125] Chimeras

[0126] It is not necessary for all positions in a given compound to be uniformly modified, and in fact more than one of the aforementioned modifications may be incorporated in a single compound or even at a single nucleoside within an iRNA. The present invention also includes iRNA compounds that are chimeric compounds. “Chimeric” iRNA compounds or “chimeras,” in the context of this invention, are iRNA compounds, preferably dsRNAs, which contain two or more chemically distinct regions, each made up of at least one monomer unit, i.e., a nucleotide in the case of a dsRNA compound. These iRNAs typically contain at least one region wherein the RNA is modified so as to confer upon the iRNA increased resistance to nuclease degradation, increased cellular uptake, and/or increased binding affinity for the target nucleic acid. An additional region of the iRNA may serve as a substrate for enzymes capable of cleaving RNA:DNA or RNA:RNA hybrids. By way of example, RNase H is a cellular endonuclease which cleaves the RNA strand of an RNA:DNA duplex. Activation of RNase H, therefore, results in cleavage of the RNA target, thereby greatly enhancing the efficiency of iRNA inhibition of gene expression. Consequently, comparable results can often be obtained with shorter iRNAs when chimeric dsRNAs are used, compared to phosphorothioate deoxy dsRNAs hybridizing to the same target region. Cleavage of the RNA target can be routinely detected by gel electrophoresis and, if necessary, associated nucleic acid hybridization techniques known in the art.

[0127] Non-Ligand Groups

[0128] In certain instances, the RNA of an iRNA can be modified by a non-ligand group. A number of non-ligand molecules have been conjugated to iRNAs in order to enhance the activity, cellular distribution or cellular uptake of the iRNA, and procedures for performing such conjugations are available in the scientific literature. Such non-ligand moieties have included lipid moieties, such as cholesterol (Kubo, T. et al., Biochem. Biophys. Res. Comm., 2007, 365(1):54-61; Letsinger et al., Proc. Natl. Acad. Sci. USA, 1989, 86:6553), cholic acid (Manoharan et al., Bioorg. Med. Chem. Lett., 1994, 4:1053), a thioether, e.g., hexyl-S-tritylthiol (Manoharan et al., Ann. N.Y. Acad. Sci., 1992, 660:306; Manoharan et al., Bioorg. Med. Chem. Let., 1993, 3:2765), a thiocholesterol (Oberhauser et al., Nucl. Acids Res., 1992, 20:533), an aliphatic chain, e.g., dodecandiol or undecyl residues (Saison-Behmoaras et al., EMBO J., 1991, 10:111; Kabanov et al., FEBS Lett., 1990, 259:327; Svinarchuk et al., Biochimie, 1993, 75:49), a phospholipid, e.g., di-hexadecyl-rac-glycerol or triethylammonium 1,2-di-O-hexadecyl-rac-glycero-3-H-phosphonate (Manoharan et al., Tetrahedron Lett., 1995, 36:3651; Shea et al., Nucl. Acids Res., 1990, 18:3777), a polyamine or a polyethylene glycol chain (Manoharan et al., Nucleosides & Nucleotides, 1995, 14:969), or adamantane acetic acid (Manoharan et al., Tetrahedron Lett., 1995, 36:3651), a palmityl moiety (Mishra et al., Biochim. Biophys. Acta, 1995, 1264:229), or an octadecylamine or hexylamino-carbonyl-oxycholesterol moiety (Crooke et al., J. Pharmacol. Exp. Ther., 1996, 277:923). Representative United States patents that teach the preparation of such RNA conjugates have been listed above. Typical conjugation protocols involve the synthesis of an RNAs bearing an aminolinker at one or more positions of the sequence. The amino group is then reacted with the molecule being conjugated using appropriate coupling or activating reagents. The conjugation reaction may be performed either with the RNA still bound to the solid support or following cleavage of the RNA, in solution phase. Purification of the RNA conjugate by HPLC typically affords the pure conjugate.

[0129] Delivery of iRNA

[0130] The delivery of an iRNA to a subject in need thereof can be achieved in a number of different ways. In vivo delivery can be performed directly by administering a composition comprising an iRNA, e.g. a dsRNA, to a subject. Alternatively, delivery can be performed indirectly by administering one or more vectors that encode and direct the expression of the iRNA. These alternatives are discussed further below.

[0131] Direct Delivery

[0132] In general, any method of delivering a nucleic acid molecule can be adapted for use with an iRNA (see e.g., Akhtar S, and Julian R L. (1992) Trends Cell. Biol. 2(5):139-144 and WO94/02595, which are incorporated herein by reference in their entireties). However, there are three factors that are important to consider in order to successfully deliver an iRNA molecule in vivo: (a) biological stability of the delivered molecule, (2) preventing non-specific effects, and (3) accumulation of the delivered molecule in the target tissue. The non-specific effects of an iRNA can be minimized by local administration, for example by direct injection or implantation into a tissue (as a non-limiting example, a tumor) or topically administering the preparation. Local administration to a treatment site maximizes local concentration of the agent, limits the exposure of the agent to systemic tissues that may otherwise be harmed by the agent or that may degrade the agent, and permits a lower total dose of the iRNA molecule to be administered. Several studies have shown successful knockdown of gene products when an iRNA is administered locally. For example, intraocular delivery of a VEGF dsRNA by intravitreal injection in cynomolgus monkeys (Tolentino, M J., et al (2004) Retina 24:132-138) and subretinal injections in mice (Reich, S J., et al (2003) Mol. Vis. 9:210-216) were both shown to prevent neovascularization in an experimental model of age-related macular degeneration. In addition, direct intratumoral injection of a dsRNA in mice reduces tumor volume (Pille, J., et al (2005) Mol. Ther. 11:267-274) and can prolong survival of tumor-bearing mice (Kim, W J., et al (2006) Mol. Ther. 14:343-350; Li, S., et al (2007) Mol. Ther. 15:515-523). RNA interference has also shown success with local delivery to the CNS by direct injection (Dorn, G., et al. (2004) Nucleic Acids 32:e49; Tan, P H., et al (2005) Gene Ther. 12:59-66; Makimura, H., et al (2002) BMC Neurosci. 3:18; Shishkina, G T., et al (2004) Neuroscience 129:521-528; Thakker, E R., et al (2004) Proc. Natl. Acad. Sci. U.S.A. 101:17270-17275; Akaneya, Y., et al (2005) J. Neurophysiol. 93:594-602) and to the lungs by intranasal administration (Howard, K A., et al (2006) Mol. Ther. 14:476-484; Zhang, X., et al (2004) J. Biol. Chem. 279:10677-10684; Bitko, V., et al (2005) Nat. Med. 11:50-55). For administering an iRNA systemically for the treatment of a disease, the RNA can be modified or alternatively delivered using a drug delivery system; both methods act to prevent the rapid degradation of the dsRNA by endo- and exo-nucleases in vivo. Modification of the RNA or the pharmaceutical carrier can also permit targeting of the iRNA composition to the target tissue and avoid undesirable off-target effects. iRNA molecules can be modified by chemical conjugation to lipophilic groups such as cholesterol to enhance cellular uptake and prevent degradation. For example, an iRNA directed against ApoB conjugated to a lipophilic cholesterol moiety was injected systemically into mice and resulted in knockdown of apoB mRNA in both the liver and jejunum (Soutschek, J., et al (2004) Nature 432:173-178). Conjugation of an iRNA to an aptamer has been shown to inhibit tumor growth and mediate tumor regression in a mouse model of prostate cancer (McNamara, J O., et al (2006) Nat. Biotechnol. 24:1005-1015). In an alternative embodiment, the iRNA can be delivered using drug delivery systems such as a nanoparticle, a dendrimer, a polymer, liposomes, or a cationic delivery system. Positively charged cationic delivery systems facilitate binding of an iRNA molecule (negatively charged) and also enhance interactions at the negatively charged cell membrane to permit efficient uptake of an iRNA by the cell. Cationic lipids, dendrimers, or polymers can either be bound to an iRNA, or induced to form a vesicle or micelle (see e.g., Kim S H., et al (2008) Journal of Controlled Release 129(2):107-116) that encases an iRNA. The formation of vesicles or micelles further prevents degradation of the iRNA when administered systemically. Methods for making and administering cationic-iRNA complexes are well within the abilities of one skilled in the art (see e.g., Sørensen, DR., et al (2003) J. Mol. Biol. 327:761-766; Verma, U N., et al (2003) Clin. Cancer Res. 9:1291-1300; Arnold, A S et al (2007) J. Hypertens. 25:197-205, which are incorporated herein by reference in their entirety). Some non-limiting examples of drug delivery systems useful for systemic delivery of iRNAs include DOTAP (Sørensen, DR., et al (2003), supra; Verma, U N., et al (2003), supra), Oligofectamine, “solid nucleic acid lipid particles” (Zimmermann, T S., et al (2006) Nature 441:111-114), cardiolipin (Chien, P Y., et al (2005) Cancer Gene Ther. 12:321-328; Pal, A., et al (2005) Int J. Oncol. 26:1087-1091), polyethyleneimine (Bonnet M E., et al (2008) Pharm. Res. August 16 Epub ahead of print; Aigner, A. (2006) J. Biomed. Biotechnol. 71659), Arg-Gly-Asp (RGD) peptides (Liu, S. (2006) Mol. Pharm. 3:472-487), and polyamidoamines (Tomalia, D A., et al (2007) Biochem. Soc. Trans. 35:61-67; Yoo, H., et al (1999) Pharm. Res. 16:1799-1804). In some embodiments, an iRNA forms a complex with cyclodextrin for systemic administration. Methods for administration and pharmaceutical compositions of iRNAs and cyclodextrins can be found in U.S. Pat. No. 7,427,605, which is herein incorporated by reference in its entirety.

[0133] Vector Encoded dsRNAs

[0134] In another aspect, the dsRNAs of the invention can be expressed from transcription units inserted into DNA or RNA vectors (see, e.g., Couture, A, et al., TIG. (1996), 12:5-10; Skillern, A., et al., International PCT Publication No. WO 00/22113, Conrad, International PCT Publication No. WO 00/22114, and Conrad, U.S. Pat. No. 6,054,299). Expression can be transient (on the order of hours to weeks) or sustained (weeks to months or longer), depending upon the specific construct used and the target tissue or cell type. These transgenes can be introduced as a linear construct, a circular plasmid, or a viral vector, which can be an integrating or non-integrating vector. The transgene can also be constructed to permit it to be inherited as an extrachromosomal plasmid (Gassmann, et al., Proc. Natl. Acad. Sci. USA (1995) 92:1292).

[0135] The individual strand or strands of an iRNA can be transcribed from a promoter on an expression vector. Where two separate strands are to be expressed to generate, for example, a dsRNA, two separate expression vectors can be co-introduced (e.g., by transfection or infection) into a target cell. Alternatively each individual strand of a dsRNA can be transcribed by promoters both of which are located on the same expression plasmid. In one embodiment, a dsRNA is expressed as an inverted repeat joined by a linker polynucleotide sequence such that the dsRNA has a stem and loop structure.

[0136] iRNA expression vectors are generally DNA plasmids or viral vectors. Expression vectors compatible with eukaryotic cells, preferably those compatible with vertebrate cells, can be used to produce recombinant constructs for the expression of an iRNA as described herein. Eukaryotic cell expression vectors are well known in the art and are available from a number of commercial sources. Typically, such vectors are provided containing convenient restriction sites for insertion of the desired nucleic acid segment. Delivery of iRNA expressing vectors can be systemic, such as by intravenous or intramuscular administration, by administration to target cells ex-planted from the patient followed by reintroduction into the patient, or by any other means that allows for introduction into a desired target cell.

[0137] iRNA expression plasmids can be transfected into target cells as a complex with cationic lipid carriers (e.g., Oligofectamine) or non-cationic lipid-based carriers (e.g., Transit-TKO™). Multiple lipid transfections for iRNA-mediated knockdowns targeting different regions of a target RNA over a period of a week or more are also contemplated by the invention. Successful introduction of vectors into host cells can be monitored using various known methods. For example, transient transfection can be signaled with a reporter, such as a fluorescent marker, such as Green Fluorescent Protein (GFP). Stable transfection of cells ex vivo can be ensured using markers that provide the transfected cell with resistance to specific environmental factors (e.g., antibiotics and drugs), such as hygromycin B resistance.

[0138] Viral vector systems which can be utilized with the methods and compositions described herein include, but are not limited to, (a) adenovirus vectors; (b) retrovirus vectors, including but not limited to lentiviral vectors, moloney murine leukemia virus, etc.; (c) adeno-associated virus vectors; (d) herpes simplex virus vectors; (e) SV 40 vectors; (f) polyoma virus vectors; (g) papilloma virus vectors; (h) picornavirus vectors; (i) pox virus vectors such as an orthopox, e.g., vaccinia virus vectors or avipox, e.g. canary pox or fowl pox; and (j) a helper-dependent or gutless adenovirus. Replication-defective viruses can also be advantageous. Different vectors will or will not become incorporated into the cells' genome. The constructs can include viral sequences for transfection, if desired. Alternatively, the construct may be incorporated into vectors capable of episomal replication, e.g. EPV and EBV vectors. Constructs for the recombinant expression of an iRNA will generally require regulatory elements, e.g., promoters, enhancers, etc., to ensure the expression of the iRNA in target cells. Other aspects to consider for vectors and constructs are further described below.

[0139] Vectors useful for the delivery of an iRNA will include regulatory elements (promoter, enhancer, etc.) sufficient for expression of the iRNA in the desired target cell or tissue. The regulatory elements can be chosen to provide either constitutive or regulated/inducible expression.

[0140] Expression of the iRNA can be precisely regulated, for example, by using an inducible regulatory sequence that is sensitive to certain physiological regulators, e.g., circulating glucose levels, or hormones (Docherty et al., 1994, FASEB J. 8:20-24). Such inducible expression systems, suitable for the control of dsRNA expression in cells or in mammals include, for example, regulation by ecdysone, by estrogen, progesterone, tetracycline, chemical inducers of dimerization, and isopropyl-beta-D1-thiogalactopyranoside (IPTG). A person skilled in the art would be able to choose the appropriate regulatory/promoter sequence based on the intended use of the iRNA transgene.

[0141] In a specific embodiment, viral vectors that contain nucleic acid sequences encoding an iRNA can be used. For example, a retroviral vector can be used (see Miller et al., Meth. Enzymol. 217:581-599 (1993)). These retroviral vectors contain the components necessary for the correct packaging of the viral genome and integration into the host cell DNA. The nucleic acid sequences encoding an iRNA are cloned into one or more vectors, which facilitates delivery of the nucleic acid into a patient. More detail about retroviral vectors can be found, for example, in Boesen et al., Biotherapy 6:291-302 (1994), which describes the use of a retroviral vector to deliver the mdr1 gene to hematopoietic stem cells in order to make the stem cells more resistant to chemotherapy. Other references illustrating the use of retroviral vectors in gene therapy are: Clowes et al., J. Clin. Invest. 93:644-651 (1994); Kiem et al., Blood 83:1467-1473 (1994); Salmons and Gunzberg, Human Gene Therapy 4:129-141 (1993); and Grossman and Wilson, Curr. Opin. in Genetics and Devel. 3:110-114 (1993). Lentiviral vectors contemplated for use include, for example, the HIV based vectors described in U.S. Pat. Nos. 6,143,520; 5,665,557; and 5,981,276, which are herein incorporated by reference.

[0142] Adenoviruses are also contemplated for use in delivery of iRNAs. Adenoviruses are especially attractive vehicles, e.g., for delivering genes to respiratory epithelia. Adenoviruses naturally infect respiratory epithelia where they cause a mild disease. Other targets for adenovirus-based delivery systems are liver, the central nervous system, endothelial cells, and muscle. Adenoviruses have the advantage of being capable of infecting non-dividing cells. Kozarsky and Wilson, Current Opinion in Genetics and Development 3:499-503 (1993) present a review of adenovirus-based gene therapy. Bout et al., Human Gene Therapy 5:3-10 (1994) demonstrated the use of adenovirus vectors to transfer genes to the respiratory epithelia of rhesus monkeys. Other instances of the use of adenoviruses in gene therapy can be found in Rosenfeld et al., Science 252:431-434 (1991); Rosenfeld et al., Cell 68:143-155 (1992); Mastrangeli et al., J. Clin. Invest. 91:225-234 (1993); PCT Publication WO94/12649; and Wang, et al., Gene Therapy 2:775-783 (1995). A suitable AV vector for expressing an iRNA featured in the invention, a method for constructing the recombinant AV vector, and a method for delivering the vector into target cells, are described in Xia H et al. (2002), Nat. Biotech. 20: 1006-1010.

[0143] Use of Adeno-associated virus (AAV) vectors is also contemplated (Walsh et al., Proc. Soc. Exp. Biol. Med. 204:289-300 (1993); U.S. Pat. No. 5,436,146). In one embodiment, the iRNA can be expressed as two separate, complementary single-stranded RNA molecules from a recombinant AAV vector having, for example, either the U6 or H1 RNA promoters, or the cytomegalovirus (CMV) promoter. Suitable AAV vectors for expressing the dsRNA featured in the invention, methods for constructing the recombinant AV vector, and methods for delivering the vectors into target cells are described in Samulski R et al. (1987), J. Virol. 61: 3096-3101; Fisher K J et al. (1996), J. Virol, 70: 520-532; Samulski R et al. (1989), J. Virol. 63: 3822-3826; U.S. Pat. No. 5,252,479; U.S. Pat. No. 5,139,941; International Patent Application No. WO 94/13788; and International Patent Application No. WO 93/24641, the entire disclosures of which are herein incorporated by reference.

[0144] Another preferred viral vector is a pox virus such as a vaccinia virus, for example an attenuated vaccinia such as Modified Virus Ankara (MVA) or NYVAC, an avipox such as fowl pox or canary pox.

[0145] The tropism of viral vectors can be modified by pseudotyping the vectors with envelope proteins or other surface antigens from other viruses, or by substituting different viral capsid proteins, as appropriate. For example, lentiviral vectors can be pseudotyped with surface proteins from vesicular stomatitis virus (VSV), rabies, Ebola, Mokola, and the like. AAV vectors can be made to target different cells by engineering the vectors to express different capsid protein serotypes; see, e.g., Rabinowitz J E et al. (2002), J Virol 76:791-801, the entire disclosure of which is herein incorporated by reference.

[0146] The pharmaceutical preparation of a vector can include the vector in an acceptable diluent, or can include a slow release matrix in which the gene delivery vehicle is imbedded. Alternatively, where the complete gene delivery vector can be produced intact from recombinant cells, e.g., retroviral vectors, the pharmaceutical preparation can include one or more cells which produce the gene delivery system.

[0147] Pharmaceutical Compositions Containing iRNA

[0148] In one embodiment, the invention provides pharmaceutical compositions containing a siRNA, as described herein, and a pharmaceutically acceptable carrier. The pharmaceutical composition containing the siRNA is useful for treating a disease or disorder associated with the expression or activity of a target gene, such as pathological processes mediated by PCSK9 expression. Such pharmaceutical compositions are formulated based on the mode of delivery. One example is compositions that are formulated for systemic administration via parenteral delivery, e.g., by intravenous (IV) delivery. Another example is compositions that are formulated for direct delivery into the brain parenchyma, e.g., by infusion into the brain, such as by continuous pump infusion.

[0149] The pharmaceutical compositions featured herein are administered in dosages sufficient to inhibit expression of the target genes. In general, a suitable dose of siRNA will be in the range of 0.01 to 200.0 milligrams per kilogram body weight of the recipient per day, generally in the range of 1 to 50 mg per kilogram body weight per day. For example, the dsRNA can be administered at 0.01 mg/kg, 0.02 mg/kg, 0.03 mg/kg, 0.04 mg/kg, 0.05 mg/kg, 0.06 mg/kg, 0.07 mg/kg, 0.08 mg/kg, 0.09 mg/kg, 0.1 mg/kg, 0.2 mg/kg, 0.3 mg/kg, 0.4 mg/kg, 0.5 mg/kg, 0.6 mg/kg, 0.7 mg/kg, 0.8 mg/kg, 0.9 mg/kg, 1 mg/kg, 1.1 mg/kg, 1.2 mg/kg, 1.3 mg/kg, 1.4 mg/kg, 1.5 mg/kg, 1.6 mg/kg, 1.7 mg/kg, 1.8 mg/kg, 1.9 mg/kg, 2 mg/kg, 3 mg/kg, 4 mg/kg, 5 mg/kg, 6 mg/kg, 7 mg/kg, 8 mg/kg, 9 mg/kg, 10 mg/kg, 11 mg/kg, 12 mg/kg, 13 mg/kg, 14 mg/kg, 15 mg/kg, 16 mg/kg, 17 mg/kg, 18 mg/kg, 19 mg/kg, 20 mg/kg, 21 mg/kg, 22 mg/kg, 23 mg/kg, 24 mg/kg, 25 mg/kg, 26 mg/kg, 27 mg/kg, 28 mg/kg, 29 mg/kg, 30 mg/kg, 31 mg/kg, 32 mg/kg, 33 mg/kg, 34 mg/kg, 35 mg/kg, 36 mg/kg, 37 mg/kg, 38 mg/kg, 39 mg/kg, 40 mg/kg, 41 mg/kg, 42 mg/kg, 43 mg/kg, 44 mg/kg, 45 mg/kg, 46 mg/kg, 47 mg/kg, 48 mg/kg, 49 mg/kg, or 50 mg/kg per single dose.

[0150] The pharmaceutical composition may be administered once daily or the iRNA may be administered as two, three, or more sub-doses at appropriate intervals throughout the day or even using continuous infusion or delivery through a controlled release formulation. In that case, the iRNA contained in each sub-dose must be correspondingly smaller in order to achieve the total daily dosage. The dosage unit can also be compounded for delivery over several days, e.g., using a conventional sustained release formulation which provides sustained release of the iRNA over a several day period. Sustained release formulations are well known in the art and are particularly useful for delivery of agents at a particular site, such as could be used with the agents of the present invention. In this embodiment, the dosage unit contains a corresponding multiple of the daily dose.

[0151] The effect of a single dose of siRNA on PCSK9 levels can be long lasting, such that subsequent doses are administered at not more than 3, 4, or 5 day intervals, or at not more than 1, 2, 3, or 4 week intervals.

[0152] The skilled artisan will appreciate that certain factors may influence the dosage and timing required to effectively treat a subject, including but not limited to the severity of the disease or disorder, previous treatments, the general health and/or age of the subject, and other diseases present. Moreover, treatment of a subject with a therapeutically effective amount of a composition can include a single treatment or a series of treatments. Estimates of effective dosages and in vivo half-lives for the individual iRNAs encompassed by the invention can be made using conventional methodologies or on the basis of in vivo testing using an appropriate animal model, as described elsewhere herein.

[0153] Advances in mouse genetics have generated a number of mouse models for the study of various human diseases, such as pathological processes mediated by PCSK9 expression. Such models can be used for in vivo testing of iRNA, as well as for determining a therapeutically effective dose. A suitable mouse model is, for example, a mouse containing a transgene expressing human PCSK9.

[0154] The present invention also includes pharmaceutical compositions and formulations that include the iRNA compounds featured in the invention. The pharmaceutical compositions of the present invention may be administered in a number of ways depending upon whether local or systemic treatment is desired and upon the area to be treated. Administration may be topical (e.g., by a transdermal patch), pulmonary, e.g., by inhalation or insufflation of powders or aerosols, including by nebulizer; intratracheal, intranasal, epidermal and transdermal, oral or parenteral. Parenteral administration includes intravenous, intraarterial, subcutaneous, intraperitoneal or intramuscular injection or infusion; subdermal, e.g., via an implanted device; or intracranial, e.g., by intraparenchymal, intrathecal or intraventricular, administration.

[0155] The iRNA can be delivered in a manner to target a particular tissue, such as the liver (e.g., the hepatocytes of the liver).

[0156] Pharmaceutical compositions and formulations for topical administration may include transdermal patches, ointments, lotions, creams, gels, drops, suppositories, sprays, liquids and powders. Conventional pharmaceutical carriers, aqueous, powder or oily bases, thickeners and the like may be necessary or desirable. Coated condoms, gloves and the like may also be useful. Suitable topical formulations include those in which the iRNAs featured in the invention are in admixture with a topical delivery agent such as lipids, liposomes, fatty acids, fatty acid esters, steroids, chelating agents and surfactants. Suitable lipids and liposomes include neutral (e.g., dioleoylphosphatidyl DOPE ethanolamine, dimyristoylphosphatidyl choline DMPC, distearolyphosphatidyl choline) negative (e.g., dimyristoylphosphatidyl glycerol DMPG) and cationic (e.g., dioleoyltetramethylaminopropyl DOTAP and dioleoylphosphatidyl ethanolamine DOTMA). iRNAs featured in the invention may be encapsulated within liposomes or may form complexes thereto, in particular to cationic liposomes. Alternatively, iRNAs may be complexed to lipids, in particular to cationic lipids. Suitable fatty acids and esters include but are not limited to arachidonic acid, oleic acid, eicosanoic acid, lauric acid, caprylic acid, capric acid, myristic acid, palmitic acid, stearic acid, linoleic acid, linolenic acid, dicaprate, tricaprate, monoolein, dilaurin, glyceryl 1-monocaprate, 1-dodecylazacycloheptan-2-one, an acylcarnitine, an acylcholine, or a C₁₋₂₀ alkyl ester (e.g., isopropylmyristate IPM), monoglyceride, diglyceride or pharmaceutically acceptable salt thereof. Topical formulations are described in detail in U.S. Pat. No. 6,747,014, which is incorporated herein by reference.

[0157] Liposomal Formulations

[0158] There are many organized surfactant structures besides microemulsions that have been studied and used for the formulation of drugs. These include monolayers, micelles, bilayers and vesicles. Vesicles, such as liposomes, have attracted great interest because of their specificity and the duration of action they offer from the standpoint of drug delivery. As used in the present invention, the term “liposome” means a vesicle composed of amphiphilic lipids arranged in a spherical bilayer or bilayers.

[0159] Liposomes are unilamellar or multilamellar vesicles which have a membrane formed from a lipophilic material and an aqueous interior. The aqueous portion contains the composition to be delivered. Cationic liposomes possess the advantage of being able to fuse to the cell wall. Non-cationic liposomes, although not able to fuse as efficiently with the cell wall, are taken up by macrophages in vivo.

[0160] In order to traverse intact mammalian skin, lipid vesicles must pass through a series of fine pores, each with a diameter less than 50 nm, under the influence of a suitable transdermal gradient. Therefore, it is desirable to use a liposome which is highly deformable and able to pass through such fine pores.

[0161] Further advantages of liposomes include; liposomes obtained from natural phospholipids are biocompatible and biodegradable; liposomes can incorporate a wide range of water and lipid soluble drugs; liposomes can protect encapsulated drugs in their internal compartments from metabolism and degradation (Rosoff, in Pharmaceutical Dosage Forms, Lieberman, Rieger and Banker (Eds.), 1988, Marcel Dekker, Inc., New York, N.Y., volume 1, p. 245). Important considerations in the preparation of liposome formulations are the lipid surface charge, vesicle size and the aqueous volume of the liposomes.

[0162] Liposomes are useful for the transfer and delivery of active ingredients to the site of action. Because the liposomal membrane is structurally similar to biological membranes, when liposomes are applied to a tissue, the liposomes start to merge with the cellular membranes and as the merging of the liposome and cell progresses, the liposomal contents are emptied into the cell where the active agent may act.

[0163] Liposomal formulations have been the focus of extensive investigation as the mode of delivery for many drugs. There is growing evidence that for topical administration, liposomes present several advantages over other formulations. Such advantages include reduced side-effects related to high systemic absorption of the administered drug, increased accumulation of the administered drug at the desired target, and the ability to administer a wide variety of drugs, both hydrophilic and hydrophobic, into the skin.

[0164] Several reports have detailed the ability of liposomes to deliver agents including high-molecular weight DNA into the skin. Compounds including analgesics, antibodies, hormones and high-molecular weight DNAs have been administered to the skin. The majority of applications resulted in the targeting of the upper epidermis

[0165] Liposomes fall into two broad classes. Cationic liposomes are positively charged liposomes which interact with the negatively charged DNA molecules to form a stable complex. The positively charged DNA/liposome complex binds to the negatively charged cell surface and is internalized in an endosome. Due to the acidic pH within the endosome, the liposomes are ruptured, releasing their contents into the cell cytoplasm (Wang et al., Biochem. Biophys. Res. Commun., 1987, 147, 980-985).

[0166] Liposomes which are pH-sensitive or negatively-charged, entrap DNA rather than complex with it. Since both the DNA and the lipid are similarly charged, repulsion rather than complex formation occurs. Nevertheless, some DNA is entrapped within the aqueous interior of these liposomes. pH-sensitive liposomes have been used to deliver DNA encoding the thymidine kinase gene to cell monolayers in culture. Expression of the exogenous gene was detected in the target cells (Zhou et al., Journal of Controlled Release, 1992, 19, 269-274).

[0167] One major type of liposomal composition includes phospholipids other than naturally-derived phosphatidylcholine. Neutral liposome compositions, for example, can be formed from dimyristoyl phosphatidylcholine (DMPC) or dipalmitoyl phosphatidylcholine (DPPC). Anionic liposome compositions generally are formed from dimyristoyl phosphatidylglycerol, while anionic fusogenic liposomes are formed primarily from dioleoyl phosphatidylethanolamine (DOPE). Another type of liposomal composition is formed from phosphatidylcholine (PC) such as, for example, soybean PC, and egg PC. Another type is formed from mixtures of phospholipid and/or phosphatidylcholine and/or cholesterol.

[0168] Several studies have assessed the topical delivery of liposomal drug formulations to the skin. Application of liposomes containing interferon to guinea pig skin resulted in a reduction of skin herpes sores while delivery of interferon via other means (e.g., as a solution or as an emulsion) were ineffective (Weiner et al., Journal of Drug Targeting, 1992, 2, 405-410). Further, an additional study tested the efficacy of interferon administered as part of a liposomal formulation to the administration of interferon using an aqueous system, and concluded that the liposomal formulation was superior to aqueous administration (du Plessis et al., Antiviral Research, 1992, 18, 259-265).

[0169] Non-ionic liposomal systems have also been examined to determine their utility in the delivery of drugs to the skin, in particular systems comprising non-ionic surfactant and cholesterol. Non-ionic liposomal formulations comprising Novasome™ I (glyceryl dilaurate/cholesterol/polyoxyethylene-10-stearyl ether) and Novasome™ II (glyceryl distearate/cholesterol/polyoxyethylene-10-stearyl ether) were used to deliver cyclosporin-A into the dermis of mouse skin. Results indicated that such non-ionic liposomal systems were effective in facilitating the deposition of cyclosporin-A into different layers of the skin (Hu et al. S.T.P. Pharma. Sci., 1994, 4, 6, 466).

[0170] Liposomes also include “sterically stabilized” liposomes, a term which, as used herein, refers to liposomes comprising one or more specialized lipids that, when incorporated into liposomes, result in enhanced circulation lifetimes relative to liposomes lacking such specialized lipids. Examples of sterically stabilized liposomes are those in which part of the vesicle-forming lipid portion of the liposome (A) comprises one or more glycolipids, such as monosialoganglioside G_{M1}, or (B) is derivatized with one or more hydrophilic polymers, such as a polyethylene glycol (PEG) moiety. While not wishing to be bound by any particular theory, it is thought in the art that, at least for sterically stabilized liposomes containing gangliosides, sphingomyelin, or PEG-derivatized lipids, the enhanced circulation half-life of these sterically stabilized liposomes derives from a reduced uptake into cells of the reticuloendothelial system (RES) (Allen et al., FEBS Letters, 1987, 223, 42; Wu et al., Cancer Research, 1993, 53, 3765).

[0171] Various liposomes comprising one or more glycolipids are known in the art. Papahadjopoulos et al. (Ann. N.Y. Acad. Sci., 1987, 507, 64) reported the ability of monosialoganglioside G_{M1}, galactocerebroside sulfate and phosphatidylinositol to improve blood half-lives of liposomes. These findings were expounded upon by Gabizon et al. (Proc. Natl. Acad. Sci. U.S.A., 1988, 85, 6949). U.S. Pat. No. 4,837,028 and WO 88/04924, both to Allen et al., disclose liposomes comprising (1) sphingomyelin and (2) the ganglioside G_{M1} or a galactocerebroside sulfate ester. U.S. Pat. No. 5,543,152 (Webb et al.) discloses liposomes comprising sphingomyelin. Liposomes comprising 1,2-sn-dimyristoylphosphatidylcholine are disclosed in WO 97/13499 (Lim et al).

[0172] Many liposomes comprising lipids derivatized with one or more hydrophilic polymers, and methods of preparation thereof, are known in the art. Sunamoto et al. (Bull. Chem. Soc. Jpn., 1980, 53, 2778) described liposomes comprising a nonionic detergent, 2C_{1215G}, that contains a PEG moiety. Illum et al. (FEBS Lett., 1984, 167, 79) noted that hydrophilic coating of polystyrene particles with polymeric glycols results in significantly enhanced blood half-lives. Synthetic phospholipids modified by the attachment of carboxylic groups of polyalkylene glycols (e.g., PEG) are described by Sears (U.S. Pat. Nos. 4,426,330 and 4,534,899). Klibanov et al. (FEBS Lett., 1990, 268, 235) described experiments demonstrating that liposomes comprising phosphatidylethanolamine (PE) derivatized with PEG or PEG stearate have significant increases in blood circulation half-lives. Blume et al. (Biochimica et Biophysica Acta, 1990, 1029, 91) extended such observations to other PEG-derivatized phospholipids, e.g., DSPE-PEG, formed from the combination of distearoylphosphatidylethanolamine (DSPE) and PEG. Liposomes having covalently bound PEG moieties on their external surface are described in European Patent No. EP 0 445 131 B1 and WO 90/04384 to Fisher. Liposome compositions containing 1-20 mole percent of PE derivatized with PEG, and methods of use thereof, are described by Woodle et al. (U.S. Pat. Nos. 5,013,556 and 5,356,633) and Martin et al. (U.S. Pat. No. 5,213,804 and European Patent No. EP 0 496 813 B1). Liposomes comprising a number of other lipid-polymer conjugates are disclosed in WO 91/05545 and U.S. Pat. No. 5,225,212 (both to Martin et al.) and in WO 94/20073 (Zalipsky et al.) Liposomes comprising PEG-modified ceramide lipids are described in WO 96/10391 (Choi et al). U.S. Pat. No. 5,540,935 (Miyazaki et al.) and U.S. Pat. No. 5,556,948 (Tagawa et al.) describe PEG-containing liposomes that can be further derivatized with functional moieties on their surfaces.

[0173] A number of liposomes comprising nucleic acids are known in the art. WO 96/40062 to Thierry et al. discloses methods for encapsulating high molecular weight nucleic acids in liposomes. U.S. Pat. No. 5,264,221 to Tagawa et al. discloses protein-bonded liposomes and asserts that the contents of such liposomes may include a dsRNA. U.S. Pat. No. 5,665,710 to Rahman et al. describes certain methods of encapsulating oligodeoxynucleotides in liposomes. WO 97/04787 to Love et al. discloses liposomes comprising dsRNAs targeted to the raf gene.

[0174] Transfersomes are yet another type of liposomes, and are highly deformable lipid aggregates which are attractive candidates for drug delivery vehicles. Transfersomes may be described as lipid droplets which are so highly deformable that they are easily able to penetrate through pores which are smaller than the droplet. Transfersomes are adaptable to the environment in which they are used, e.g., they are self-optimizing (adaptive to the shape of pores in the skin), self-repairing, frequently reach their targets without fragmenting, and often self-loading. To make transfersomes it is possible to add surface edge-activators, usually surfactants, to a standard liposomal composition. Transfersomes have been used to deliver serum albumin to the skin. The transfersome-mediated delivery of serum albumin has been shown to be as effective as subcutaneous injection of a solution containing serum albumin.

[0175] Surfactants find wide application in formulations such as emulsions (including microemulsions) and liposomes. The most common way of classifying and ranking the properties of the many different types of surfactants, both natural and synthetic, is by the use of the hydrophile/lipophile balance (HLB). The nature of the hydrophilic group (also known as the “head”) provides the most useful means for categorizing the different surfactants used in formulations (Rieger, in Pharmaceutical Dosage Forms, Marcel Dekker, Inc., New York, N.Y., 1988, p. 285).

[0176] If the surfactant molecule is not ionized, it is classified as a nonionic surfactant. Nonionic surfactants find wide application in pharmaceutical and cosmetic products and are usable over a wide range of pH values. In general, their HLB values range from 2 to about 18 depending on their structure. Nonionic surfactants include nonionic esters such as ethylene glycol esters, propylene glycol esters, glyceryl esters, polyglyceryl esters, sorbitan esters, sucrose esters, and ethoxylated esters. Nonionic alkanolamides and ethers such as fatty alcohol ethoxylates, propoxylated alcohols, and ethoxylated/propoxylated block polymers are also included in this class. The polyoxyethylene surfactants are the most popular members of the nonionic surfactant class.

[0177] If the surfactant molecule carries a negative charge when it is dissolved or dispersed in water, the surfactant is classified as anionic. Anionic surfactants include carboxylates such as soaps, acyl lactylates, acyl amides of amino acids, esters of sulfuric acid such as alkyl sulfates and ethoxylated alkyl sulfates, sulfonates such as alkyl benzene sulfonates, acyl isethionates, acyl taurates and sulfosuccinates, and phosphates. The most important members of the anionic surfactant class are the alkyl sulfates and the soaps.

[0178] If the surfactant molecule carries a positive charge when it is dissolved or dispersed in water, the surfactant is classified as cationic. Cationic surfactants include quaternary ammonium salts and ethoxylated amines. The quaternary ammonium salts are the most used members of this class.

[0179] If the surfactant molecule has the ability to carry either a positive or negative charge, the surfactant is classified as amphoteric. Amphoteric surfactants include acrylic acid derivatives, substituted alkylamides, N-alkylbetaines and phosphatides.

[0180] The use of surfactants in drug products, formulations and in emulsions has been reviewed (Rieger, in Pharmaceutical Dosage Forms, Marcel Dekker, Inc., New York, N.Y., 1988, p. 285).

[0181] Nucleic Acid Lipid Particles

[0182] In one embodiment, a siRNA featured in the invention is fully encapsulated in the lipid formulation, e.g., to form a nucleic acid-lipid particle, e.g., a SPLP, pSPLP, or SNALP.

[0183] As used herein, the term “SNALP” refers to a stable nucleic acid-lipid particle, including SPLP. As used herein, the term “SPLP” refers to a nucleic acid-lipid particle comprising plasmid DNA encapsulated within a lipid vesicle. Nucleic acid-lipid particles, e.g., SNALPs, typically contain a cationic lipid, a non-cationic lipid, and a lipid that prevents aggregation of the particle (e.g., a PEG-lipid conjugate). SNALPs and SPLPs are extremely useful for systemic applications, as they exhibit extended circulation lifetimes following intravenous (i.v.) injection and accumulate at distal sites (e.g., sites physically separated from the administration site). SPLPs include “pSPLP”, which include an encapsulated condensing agent-nucleic acid complex as set forth in PCT Publication No. WO 00/03683.

[0184] The particles of the present invention typically have a mean diameter of about 50 nm to about 150 nm, more typically about 60 nm to about 130 nm, more typically about 70 nm to about 110 nm, most typically about 70 nm to about 90 nm, and are substantially nontoxic. For example, the mean diameter of the particles can be about 50 nm, 55 nm, 60 nm, 65 nm, 70 nm, 75 nm, 80 nm, 85 nm, 90 nm, 95 nm, 100 nm, 105 nm, 110 nm, 115 nm, 120 nm, 125 nm, 130 nm, 140 nm, 145 nm, or 150 nm.

[0185] In addition, the nucleic acids when present in the nucleic acid-lipid particles of the present invention are resistant in aqueous solution to degradation with a nuclease. Nucleic acid-lipid particles and their method of preparation are disclosed in, e.g., U.S. Pat. Nos. 5,976,567; 5,981,501; 6,534,484; 6,586,410; 6,815,432; and PCT Publication No. WO 96/40964.

[0186] In one embodiment, the lipid to drug ratio (mass/mass ratio) (e.g., lipid to dsRNA ratio) will be in the range of from about 1:1 to about 50:1, from about 1:1 to about 25:1, from about 3:1 to about 15:1, from about 4:1 to about 10:1, from about 5:1 to about 9:1, or about 6:1 to about 9:1. The lipid to dsRNA ratio can be about 5:1, 6:1, 7:1, 8:1, 9:1, 10:1, 11:1, 12:1, 113:1, 14:1, 15:1, 16:1, 17:1, 18:1, 19:1, 20:1, 21:1, 22:1, 23:1, 24:1, 25:1, 26:1, 27:1, 28:1, 29:1, 30:1, 31:1, 32:1, 33:1, 34:1, 35:1, 36:1, 37:1, 38:1, 39:1, 40:1, 41:1, 42:1, 43:1, 44:1, 45:1, 46:1, 47:1, 48:1, 49:1, or 50:1.

[0187] The nucleic acid lipid particles include a cationic lipid. The cationic lipid may be, for example, N,N-dioleyl-N,N-dimethylammonium chloride (DODAC), N,N-distearyl-N,N-dimethylammonium bromide (DDAB), N-(1-(2,3-dioleoyloxy)propyl)-N,N,N-trimethylammonium chloride (DOTAP), N-(1-(2,3-dioleyloxy)propyl)-N,N,N-trimethylammonium chloride (DOTMA), N,N-dimethyl-2,3-dioleyloxy)propylamine (DODMA), 1,2-Dilinolenyloxy-N,N-dimethylaminopropane (DLenDMA), 1,2-Dilinoleylcarbamoyloxy-3-dimethylaminopropane (DLin-C-DAP), 1,2-Dilinoleyoxy-3-(dimethylamino)acetoxypropane (DLin-DAC), 1,2-Dilinoleyoxy-3-morpholinopropane (DLin-MA), 1,2-Dilinoleoyl-3-dimethylaminopropane (DLinDAP), 1,2-Dilinoleylthio-3-dimethylaminopropane (DLin-S-DMA), 1-Linoleoyl-2-linoleyloxy-3-dimethylaminopropane (DLin-2-DMAP), 1,2-Dilinoleyloxy-3-trimethylaminopropane chloride salt (DLin-TMA.Cl), 1,2-Dilinoleoyl-3-trimethylaminopropane chloride salt (DLin-TAP.Cl), 1,2-Dilinoleyloxy-3-(N-methylpiperazino)propane (DLin-MPZ), or 3-(N,N-Dilinoleylamino)-1,2-propanediol (DLinAP), 3-(N,N-Dioleylamino)-1,2-propanedio (DOAP), 1,2-Dilinoleyloxo-3-(2-N,N-dimethylamino)ethoxypropane (DLin-EG-DMA), 1,2-Dilinolenyloxy-N,N-dimethylaminopropane (DLinDMA), 2,2-Dilinoleyl-4-dimethylaminomethyl[1,3]-dioxolane (DLin-K-DMA) or analogs thereof, 2,2-Dilinoleyl-4-dimethylaminoethyl[1,3]-dioxolane (XTC), (3aR,5s,6aS)-N,N-dimethyl-2,2-di((9Z,12Z)-octadeca-9,12-dienyl)tetrahydro-3aH-cyclopenta[d][1,3]dioxol-5-amine (ALN100), (6Z,9Z,28Z,31Z)-heptatriaconta-6,9,28,31-tetraen-19-yl-4-(dimethylamino)butanoate (MC3), 1,1′-(2-(4-(2-((2-(bis(2-hydroxydodecyl)amino)ethyl)(2-hydroxydodecyl)amino)ethyl)piperazin-1-yl)ethylazanediyl)didodecan-2-ol (Tech G1, e.g., C12-200), or a mixture thereof.

[0188] The cationic lipid may comprise from about 10 mol % to about 70 mol % or about 40 mol % of the total lipid present in the particle. The cationic lipid may comprise 10 mol %, 15 mol %, 20 mol %, 25 mol %, 30 mol %, 35 mol %, 40 mol %, 45 mol %, 50 mol %, 55 mol %, 60 mol %, 65 mol %, 70 mol %, 75 mol %, 80 mol %, 85 mol %, 90 mol %, or 95 mol % of the total lipid present in the particle. The cationic lipid may comprise 57.1 mol % or 57.5 mol % of the total lipid present in the particle.

[0189] The nucleic acid lipid particle generally includes a non-cationic lipid. The non-cationic lipid may be an anionic lipid or a neutral lipid including, but not limited to, distearoylphosphatidylcholine (DSPC), dioleoylphosphatidylcholine (DOPC), dipalmitoylphosphatidylcholine (DPPC), dioleoylphosphatidylglycerol (DOPG), dipalmitoylphosphatidylglycerol (DPPG), dioleoyl-phosphatidylethanolamine (DOPE), palmitoyloleoylphosphatidylcholine (POPC), palmitoyloleoylphosphatidylethanolamine (POPE), dioleoyl-phosphatidylethanolamine 4-(N-maleimidomethyl)-cyclohexane-1-carboxylate (DOPE-mal), dipalmitoyl phosphatidyl ethanolamine (DPPE), dimyristoylphosphoethanolamine (DMPE), distearoyl-phosphatidyl-ethanolamine (DSPE), 16-O-monomethyl PE, 16-O-dimethyl PE, 18-1-trans PE, 1-stearoyl-2-oleoyl-phosphatidyethanolamine (SOPE), cholesterol, or a mixture thereof.

[0190] The non-cationic lipid may be from about 5 mol % to about 90 mol %, about 10 mol %, or about 58 mol % if cholesterol is included, of the total lipid present in the particle. The non-cationic lipid may be about 5 mol %, 6 mol %, 7 mol %, 7.5 mol %, 7.7 mol %, 8 mol %, 9 mol %, 10 mol %, 11 mol %, 12 mol %, 13 mol %, 14 mol %, 15 mol %, 16 mol %, 17 mol %, 18 mol %, 19 mol %, 20 mol %, 25 mol %, 30 mol %, 35 mol %, 40 mol %, 45 mol %, 50 mol %, 55 mol %, 60 mol %, 65 mol %, 70 mol %, 75 mol %, 80 mol %, 85 mol %, 90 mol %, or 95 mol %.

[0191] The nucleic acid lipid particle generally includes a conjugated lipid. The conjugated lipid that inhibits aggregation of particles may be, for example, a polyethyleneglycol (PEG)-lipid including, without limitation, a PEG-diacylglycerol (DAG), a PEG-dialkyloxypropyl (DAA), a PEG-phospholipid, a PEG-ceramide (Cer), or a mixture thereof. The PEG-DAA conjugate may be, for example, a PEG-dilauryloxypropyl (Ci₂), a PEG-dimyristyloxypropyl (Ci₄), a PEG-dipalmityloxypropyl (Ci₆), or a PEG-distearyloxypropyl (C]₈). The conjugated lipid can be PEG-DMG (PEG-didimyristoyl glycerol (C14-PEG, or PEG-C14) (PEG with avg mol wt of 2000); PEG-DSG (PEG-distyryl glycerol (C18-PEG, or PEG-C18) (PEG with avg mol wt of 2000); or PEG-cDMA: PEG-carbamoyl-1,2-dimyristyloxypropylamine (PEG with avg mol wt of 2000).

[0192] The conjugated lipid that prevents aggregation of particles may be from 0 mol % to about 20 mol % or about 1.0, 2.0, 3.0, 4.0, 5.0, 6.0, 7.0, 8.0, 9.0, 10.0, 11.0, 12.0, 13.0, 14.0, 15.0, 16.0 17.0, 18, 19.0 or 20.0 mol % of the total lipid present in the particle.

[0193] In some embodiments, the nucleic acid-lipid particle further includes cholesterol at, e.g., about 10 mol % to about 60 mol % or about 48 mol % of the total lipid present in the particle. For example, the nucleic acid-lipid particle further includes cholesterol at about 5 mol %, 10 mol %, 15 mol %, 20 mol %, 25 mol %, 30 mol %, 35 mol %, 40 mol %, 45 mol %, 50 mol %, 55 mol %, or 60 mol %. The nucleic acid-lipid particle can include cholesterol at about 31.5 mol %, 34.4 mol %, 35 mol %, 38.5 mol %, or 40 mol % of the total lipid present in the particle.

[0194] Exemplary Nucleic Acid Lipid Particles LNP01 formulations are described, e.g., in International Application Publication No. WO 2008/042973, which is hereby incorporated by reference. Additional exemplary lipid-dsRNA formulations are as follows:

TABLE A

| | | cationic lipid/non-cationic |
|---|---|---|
| | | lipid/cholesterol/PEG-lipid |
| | Cationic | conjugate Mol % ratios |
| | Lipid | Lipid:siRNA ratio |
| SNALP | DLinDMA | DLinDMA/DPPC/Cholesterol/PEG-cDMA |
| | | (57.1/7.1/34.4/1.4) |
| | | lipid:siRNA ~7:1 |
| S-XTC | XTC | XTC/DPPC/Cholesterol/PEG-cDMA |
| | | 57.1/7.1/34.4/1.4 |
| | | lipid:siRNA ~7:1 |
| LNP05 | XTC | XTC/DSPC/Cholesterol/PEG-DMG |
| | | 57.5/7.5/31.5/3.5 |
| | | lipid:siRNA ~6:1 |
| LNP06 | XTC | XTC/DSPC/Cholesterol/PEG-DMG |
| | | 57.5/7.5/31.5/3.5 |
| | | lipid:siRNA ~11:1 |
| LNP07 | XTC | XTC/DSPC/Cholesterol/PEG-DMG |
| | | 60/7.5/31/1.5, |
| | | lipid:siRNA ~6:1 |
| LNP08 | XTC | XTC/DSPC/Cholesterol/PEG-DMG |
| | | 60/7.5/31/1.5, |
| | | lipid:siRNA ~11:1 |
| LNP09 | XTC | XTC/DSPC/Cholesterol/PEG-DMG |
| | | 50/10/38.5/1.5 |
| | | Lipid:siRNA 10:1 |
| LNP10 | ALN100 | ALN100/DSPC/Cholesterol/PEG-DMG |
| | | 50/10/38.5/1.5 |
| | | Lipid:siRNA 10:1 |
| LNP11 | MC3 | MC-3/DSPC/Cholesterol/PEG-DMG |
| | | 50/10/38.5/1.5 |
| | | Lipid:siRNA 10:1 |
| LNP12 | C12-200 | C12-200/DSPC/Cholesterol/PEG-DMG |
| | | 50/10/38.5/1.5 |
| | | Lipid:siRNA 10:1 |
| LNP13 | XTC | XTC/DSPC/Chol/PEG-DMG |
| | | 50/10/38.5/1.5 |
| | | Lipid:siRNA: 33:1 |
| LNP14 | MC3 | MC3/DSPC/Chol/PEG-DMG |
| | | 40/15/40/5 |
| | | Lipid:siRNA: 11:1 |
| LNP15 | MC3 | MC3/DSPC/Chol/PEG-DSG/GalNAc-PEG-DSG |
| | | 50/10/35/4.5/0.5 |
| | | Lipid:siRNA: 11:1 |
| LNP16 | MC3 | MC3/DSPC/Chol/PEG-DMG |
| | | 50/10/38.5/1.5 |
| | | Lipid:siRNA: 7:1 |
| LNP17 | MC3 | MC3/DSPC/Chol/PEG-DSG |
| | | 50/10/38.5/1.5 |
| | | Lipid:siRNA: 10:1 |
| LNP18 | MC3 | MC3/DSPC/Chol/PEG-DMG |
| | | 50/10/38.5/1.5 |
| | | Lipid:siRNA: 12:1 |
| LNP19 | MC3 | MC3/DSPC/Chol/PEG-DMG |
| | | 50/10/35/5 |
| | | Lipid:siRNA: 8:1 |
| LNP20 | MC3 | MC3/DSPC/Chol/PEG-DPG |
| | | 50/10/38.5/1.5 |
| | | Lipid:siRNA: 10:1 |
| LNP21 | C12-200 | C12-200/DSPC/Chol/PEG-DSG |
| | | 50/10/38.5/1.5 |
| | | Lipid:siRNA: 7:1 |
| LNP22 | XTC | XTC/DSPC/Chol/PEG-DSG |
| | | 50/10/38.5/1.5 |
| | | Lipid:siRNA: 10:1 |

SNALP (1,2-Dilinolenyloxy-N,N-dimethylaminopropane (DLinDMA)) comprising formulations are described in International Publication No. WO2009/127060, filed Apr. 15, 2009, which is hereby incorporated by reference.
XTC comprising formulations are described, e.g., in U.S. Provisional Ser. No. 61/148,366, filed Jan. 29, 2009; U.S. Provisional Ser. No. 61/156,851, filed Mar. 2, 2009; U.S. Provisional Ser. No. filed Jun. 10, 2009; U.S. Provisional Ser. No. 61/228,373, filed Jul. 24, 2009; U.S. Provisional Ser. No. 61/239,686, filed Sep. 3, 2009, and International Application No. PCT/US2010/022614, filed Jan. 29, 2010, which are hereby incorporated by reference.
MC3 comprising formulations are described, e.g., in U.S. Provisional Ser. No. 61/244,834, filed Sep. 22, 2009, U.S. Provisional Ser. No. 61/185,800, filed Jun. 10, 2009, and International Application No. PCT/US10/28224, filed Jun. 10, 2010, which are hereby incorporated by reference.
ALNY-100 comprising formulations are described, e.g., International patent application number PCT/US09/63933, filed on Nov. 10, 2009, which is hereby incorporated by reference.
C12-200 comprising formulations are described in U.S. Provisional Ser. No. 61/175,770, filed May 5, 2009 and International Application No. PCT/US10/33777, filed May 5, 2010, which are hereby incorporated by reference.

[0195] Synthesis of Cationic Lipids.

[0196] Any of the compounds, e.g., cationic lipids and the like, used in the nucleic acid-lipid particles of the invention may be prepared by known organic synthesis techniques, including the methods described in more detail in the Examples. All substituents are as defined below unless indicated otherwise.

[0197] “Alkyl” means a straight chain or branched, noncyclic or cyclic, saturated aliphatic hydrocarbon containing from 1 to 24 carbon atoms. Representative saturated straight chain alkyls include methyl, ethyl, n-propyl, n-butyl, n-pentyl, n-hexyl, and the like; while saturated branched alkyls include isopropyl, sec-butyl, isobutyl, tert-butyl, isopentyl, and the like. Representative saturated cyclic alkyls include cyclopropyl, cyclobutyl, cyclopentyl, cyclohexyl, and the like; while unsaturated cyclic alkyls include cyclopentenyl and cyclohexenyl, and the like.

[0198] “Alkenyl” means an alkyl, as defined above, containing at least one double bond between adjacent carbon atoms. Alkenyls include both cis and trans isomers. Representative straight chain and branched alkenyls include ethylenyl, propylenyl, 1-butenyl, 2-butenyl, isobutylenyl, 1-pentenyl, 2-pentenyl, 3-methyl-1-butenyl, 2-methyl-2-butenyl, 2,3-dimethyl-2-butenyl, and the like.

[0199] “Alkynyl” means any alkyl or alkenyl, as defined above, which additionally contains at least one triple bond between adjacent carbons. Representative straight chain and branched alkynyls include acetylenyl, propynyl, 1-butynyl, 2-butynyl, 1-pentynyl, 2-pentynyl, 3-methyl-1 butynyl, and the like.

[0200] “Acyl” means any alkyl, alkenyl, or alkynyl wherein the carbon at the point of attachment is substituted with an oxo group, as defined below. For example, —C(═O)alkyl, —C(═O)alkenyl, and —C(═O)alkynyl are acyl groups.

[0201] “Heterocycle” means a 5- to 7-membered monocyclic, or 7- to 10-membered bicyclic, heterocyclic ring which is either saturated, unsaturated, or aromatic, and which contains from 1 or 2 heteroatoms independently selected from nitrogen, oxygen and sulfur, and wherein the nitrogen and sulfur heteroatoms may be optionally oxidized, and the nitrogen heteroatom may be optionally quaternized, including bicyclic rings in which any of the above heterocycles are fused to a benzene ring. The heterocycle may be attached via any heteroatom or carbon atom. Heterocycles include heteroaryls as defined below. Heterocycles include morpholinyl, pyrrolidinonyl, pyrrolidinyl, piperidinyl, piperizynyl, hydantoinyl, valerolactamyl, oxiranyl, oxetanyl, tetrahydrofuranyl, tetrahydropyranyl, tetrahydropyridinyl, tetrahydroprimidinyl, tetrahydrothiophenyl, tetrahydrothiopyranyl, tetrahydropyrimidinyl, tetrahydrothiophenyl, tetrahydrothiopyranyl, and the like.

[0202] The terms “optionally substituted alkyl”, “optionally substituted alkenyl”, “optionally substituted alkynyl”, “optionally substituted acyl”, and “optionally substituted heterocycle” means that, when substituted, at least one hydrogen atom is replaced with a substituent. In the case of an oxo substituent (═O) two hydrogen atoms are replaced. In this regard, substituents include oxo, halogen, heterocycle, —CN, —ORx, —NRxRy, —NRxC(═O)Ry, —NRxSO2Ry, —C(═O)Rx, —C(═O)ORx, —C(═O)NRxRy, —SOnRx and —SOnNRxRy, wherein n is 0, 1 or 2, Rx and Ry are the same or different and independently hydrogen, alkyl or heterocycle, and each of said alkyl and heterocycle substituents may be further substituted with one or more of oxo, halogen, —OH, —CN, alkyl, —ORx, heterocycle, —NRxRy, —NRxC(═O)Ry, —NRxSO2Ry, —C(═O)Rx, —C(═O)ORx, —C(═O)NRxRy, —SOnRx and —SOnNRxRy.

[0203] “Halogen” means fluoro, chloro, bromo and iodo.

[0204] In some embodiments, the methods of the invention may require the use of protecting groups. Protecting group methodology is well known to those skilled in the art (see, for example, Protective Groups in Organic Synthesis, Green, T. W. et al., Wiley-Interscience, New York City, 1999). Briefly, protecting groups within the context of this invention are any group that reduces or eliminates unwanted reactivity of a functional group. A protecting group can be added to a functional group to mask its reactivity during certain reactions and then removed to reveal the original functional group. In some embodiments an “alcohol protecting group” is used. An “alcohol protecting group” is any group which decreases or eliminates unwanted reactivity of an alcohol functional group. Protecting groups can be added and removed using techniques well known in the art.

[0205] Synthesis of Formula A

[0206] In one embodiments, nucleic acid-lipid particles of the invention are formulated using a cationic lipid of formula A; XTC is a cationic lipid of formula A:

[chemical structure]

[0207] where R1 and R2 are independently alkyl, alkenyl or alkynyl, each can be optionally substituted, and R3 and R4 are independently lower alkyl or R3 and R4 can be taken together to form an optionally substituted heterocyclic ring.

[0208] In general, the lipid of formula A above may be made by the following Reaction Schemes 1 or 2, wherein all substituents are as defined above unless indicated otherwise.

[chemical structure]

[0209] Lipid A, where R₁ and R₂ are independently alkyl, alkenyl or alkynyl, each can be optionally substituted, and R₃ and R₄ are independently lower alkyl or R₃ and R₄ can be taken together to form an optionally substituted heterocyclic ring, can be prepared according to Scheme 1. Ketone 1 and bromide 2 can be purchased or prepared according to methods known to those of ordinary skill in the art. Reaction of 1 and 2 yields ketal 3. Treatment of ketal 3 with amine 4 yields lipids of formula A. The lipids of formula A can be converted to the corresponding ammonium salt with an organic salt of formula 5, where X is anion counter ion selected from halogen, hydroxide, phosphate, sulfate, or the like.

[chemical structure]

[0210] Alternatively, the ketone 1 starting material can be prepared according to Scheme 2. Grignard reagent 6 and cyanide 7 can be purchased or prepared according to methods known to those of ordinary skill in the art. Reaction of 6 and 7 yields ketone 1. Conversion of ketone 1 to the corresponding lipids of formula A is as described in Scheme 1.

[0211] Synthesis of MC3

[0212] Preparation of DLin-M-C3-DMA (i.e., (6Z,9Z,28Z,31Z)-heptatriaconta-6,9,28,31-tetraen-19-yl-4-(dimethylamino)butanoate) was as follows. A solution of (6Z,9Z,28Z,31Z)-heptatriaconta-6,9,28,31-tetraen-19-ol (0.53 g), 4-N,N-dimethylaminobutyric acid hydrochloride (0.51 g), 4-N,N-dimethylaminopyridine (0.61 g) and 1-ethyl-3-(3-dimethylaminopropyl)carbodiimide hydrochloride (0.53 g) in dichloromethane (5 mL) was stirred at room temperature overnight. The solution was washed with dilute hydrochloric acid followed by dilute aqueous sodium bicarbonate. The organic fractions were dried over anhydrous magnesium sulphate, filtered and the solvent removed on a rotovap. The residue was passed down a silica gel column (20 g) using a 1-5% methanol/dichloromethane elution gradient. Fractions containing the purified product were combined and the solvent removed, yielding a colorless oil (0.54 g).

[0213] Synthesis of ALNY-100

[0214] Synthesis of ketal 519 [ALNY-100] was performed using the following scheme 3:

[chemical structure]

[0215] Synthesis of 515:

[0216] To a stirred suspension of LiAlH4 (3.74 g, 0.09852 mol) in 200 ml anhydrous THF in a two neck RBF (1 L), was added a solution of 514 (10 g, 0.04926 mol) in 70 mL of THF slowly at 0° C. under nitrogen atmosphere. After complete addition, reaction mixture was warmed to room temperature and then heated to reflux for 4 h. Progress of the reaction was monitored by TLC. After completion of reaction (by TLC) the mixture was cooled to 0° C. and quenched with careful addition of saturated Na2SO4 solution. Reaction mixture was stirred for 4 h at room temperature and filtered off. Residue was washed well with THF. The filtrate and washings were mixed and diluted with 400 mL dioxane and 26 mL conc. HCl and stirred for 20 minutes at room temperature. The volatilities were stripped off under vacuum to furnish the hydrochloride salt of 515 as a white solid. Yield: 7.12 g ¹H-NMR (DMSO, 400 MHz): δ=9.34 (broad, 2H), 5.68 (s, 2H), 3.74 (m, 1H), 2.66-2.60 (m, 2H), 2.50-2.45 (m, 5H).

[0217] Synthesis of 516:

[0218] To a stirred solution of compound 515 in 100 mL dry DCM in a 250 mL two neck RBF, was added NEt3 (37.2 mL, 0.2669 mol) and cooled to 0° C. under nitrogen atmosphere. After a slow addition of N-(benzyloxy-carbonyloxy)-succinimide (20 g, 0.08007 mol) in 50 mL dry DCM, reaction mixture was allowed to warm to room temperature. After completion of the reaction (2-3 h by TLC) mixture was washed successively with 1N HCl solution (1×100 mL) and saturated NaHCO3 solution (1×50 mL). The organic layer was then dried over anhyd. Na2SO4 and the solvent was evaporated to give crude material which was purified by silica gel column chromatography to get 516 as sticky mass. Yield: 11 g (89%). 1H-NMR (CDCl₃, 400 MHz): δ=7.36-7.27 (m, 5H), 5.69 (s, 2H), 5.12 (s, 2H), 4.96 (br., 1H) 2.74 (s, 3H), 2.60 (m, 2H), 2.30-2.25 (m, 2H). LC-MS [M+H] −232.3 (96.94%).

[0219] Synthesis of 517A and 517B:

[0220] The cyclopentene 516 (5 g, 0.02164 mol) was dissolved in a solution of 220 mL acetone and water (10:1) in a single neck 500 mL RBF and to it was added N-methyl morpholine-N-oxide (7.6 g, 0.06492 mol) followed by 4.2 mL of 7.6% solution of OsO4 (0.275 g, 0.00108 mol) in tert-butanol at room temperature. After completion of the reaction (˜3 h), the mixture was quenched with addition of solid Na2SO3 and resulting mixture was stirred for 1.5 h at room temperature. Reaction mixture was diluted with DCM (300 mL) and washed with water (2×100 mL) followed by saturated NaHCO3 (1×50 mL) solution, water (1×30 mL) and finally with brine (lx 50 mL). Organic phase was dried over an. Na2SO4 and solvent was removed in vacuum. Silica gel column chromatographic purification of the crude material was afforded a mixture of diastereomers, which were separated by prep HPLC. Yield: −6 g crude

[0221] 517A—Peak-1 (white solid), 5.13 g (96%). 1H-NMR (DMSO, 400 MHz): δ=7.39-7.31 (m, 5H), 5.04 (s, 2H), 4.78-4.73 (m, 1H), 4.48-4.47 (d, 2H), 3.94-3.93 (m, 2H), 2.71 (s, 3H), 1.72-1.67 (m, 4H). LC-MS—[M+H]-266.3, [M+NH4+]-283.5 present, HPLC-97.86%. Stereochemistry confirmed by X-ray.

[0222] Synthesis of 518:

[0223] Using a procedure analogous to that described for the synthesis of compound 505, compound 518 (1.2 g, 41%) was obtained as a colorless oil. ¹H-NMR (CDCl₃, 400 MHz): δ=7.35-7.33 (m, 4H), 7.30-7.27 (m, 1H), 5.37-5.27 (m, 8H), 5.12 (s, 2H), 4.75 (m, 1H), 4.58-4.57 (m, 2H), 2.78-2.74 (m, 7H), 2.06-2.00 (m, 8H), 1.96-1.91 (m, 2H), 1.62 (m, 4H), 1.48 (m, 2H), 1.37-1.25 (br m, 36H), 0.87 (m, 6H). HPLC-98.65%.

[0224] General Procedure for the Synthesis of Compound 519:

[0225] A solution of compound 518 (1 eq) in hexane (15 mL) was added in a drop-wise fashion to an ice-cold solution of LAH in THF (1 M, 2 eq). After complete addition, the mixture was heated at 40° C. over 0.5 h then cooled again on an ice bath. The mixture was carefully hydrolyzed with saturated aqueous Na2SO4 then filtered through celite and reduced to an oil. Column chromatography provided the pure 519 (1.3 g, 68%) which was obtained as a colorless oil. ¹³C NMR=130.2, 130.1 (x2), 127.9 (x3), 112.3, 79.3, 64.4, 44.7, 38.3, 35.4, 31.5, 29.9 (x2), 29.7, 29.6 (x2), 29.5 (x3), 29.3 (x2), 27.2 (x3), 25.6, 24.5, 23.3, 226, 14.1; Electrospray MS (+ve): Molecular weight for C44H80NO2 (M+H)+ Calc. 654.6. Found 654.6.

[0226] General Synthesis of Nucleic Acid Lipid Particles

[0227] Formulations prepared by either the standard or extrusion-free method can be characterized in similar manners. For example, formulations are typically characterized by visual inspection. They should be whitish translucent solutions free from aggregates or sediment. Particle size and particle size distribution of lipid-nanoparticles can be measured by light scattering using, for example, a Malvern Zetasizer Nano ZS (Malvern, USA). Particles should be about 20-300 nm, such as 40-100 nm in size. The particle size distribution should be unimodal. The total dsRNA concentration in the formulation, as well as the entrapped fraction, is estimated using a dye exclusion assay. A sample of the formulated dsRNA can be incubated with an RNA-binding dye, such as Ribogreen (Molecular Probes) in the presence or absence of a formulation disrupting surfactant, e.g., 0.5% Triton-X100. The total dsRNA in the formulation can be determined by the signal from the sample containing the surfactant, relative to a standard curve. The entrapped fraction is determined by subtracting the “free” dsRNA content (as measured by the signal in the absence of surfactant) from the total dsRNA content. Percent entrapped dsRNA is typically >85%. For SNALP formulation, the particle size is at least 30 nm, at least 40 nm, at least 50 nm, at least 60 nm, at least 70 nm, at least 80 nm, at least 90 nm, at least 100 nm, at least 110 nm, and at least 120 nm. The suitable range is typically about at least 50 nm to about at least 110 nm, about at least 60 nm to about at least 100 nm, or about at least 80 nm to about at least 90 nm.

[0228] Other Formulations

[0229] Compositions and formulations for oral administration include powders or granules, microparticulates, nanoparticulates, suspensions or solutions in water or non-aqueous media, capsules, gel capsules, sachets, tablets or minitablets. Thickeners, flavoring agents, diluents, emulsifiers, dispersing aids or binders may be desirable. In some embodiments, oral formulations are those in which dsRNAs featured in the invention are administered in conjunction with one or more penetration enhancers surfactants and chelators. Suitable surfactants include fatty acids and/or esters or salts thereof, bile acids and/or salts thereof. Suitable bile acids/salts include chenodeoxycholic acid (CDCA) and ursodeoxychenodeoxycholic acid (UDCA), cholic acid, dehydrocholic acid, deoxycholic acid, glucholic acid, glycholic acid, glycodeoxycholic acid, taurocholic acid, taurodeoxycholic acid, sodium tauro-24,25-dihydro-fusidate and sodium glycodihydrofusidate. Suitable fatty acids include arachidonic acid, undecanoic acid, oleic acid, lauric acid, caprylic acid, capric acid, myristic acid, palmitic acid, stearic acid, linoleic acid, linolenic acid, dicaprate, tricaprate, monoolein, dilaurin, glyceryl 1-monocaprate, 1-dodecylazacycloheptan-2-one, an acylcarnitine, an acylcholine, or a monoglyceride, a diglyceride or a pharmaceutically acceptable salt thereof (e.g., sodium). In some embodiments, combinations of penetration enhancers are used, for example, fatty acids/salts in combination with bile acids/salts. One exemplary combination is the sodium salt of lauric acid, capric acid and UDCA. Further penetration enhancers include polyoxyethylene-9-lauryl ether, polyoxyethylene-20-cetyl ether. DsRNAs featured in the invention may be delivered orally, in granular form including sprayed dried particles, or complexed to form micro or nanoparticles. DsRNA complexing agents include poly-amino acids; polyimines; polyacrylates; polyalkylacrylates, polyoxethanes, polyalkylcyanoacrylates; cationized gelatins, albumins, starches, acrylates, polyethyleneglycols (PEG) and starches; polyalkylcyanoacrylates; DEAE-derivatized polyimines, pollulans, celluloses and starches. Suitable complexing agents include chitosan, N-trimethylchitosan, poly-L-lysine, polyhistidine, polyornithine, polyspermines, protamine, polyvinylpyridine, polythiodiethylaminomethylethylene P(TDAE), polyaminostyrene (e.g., p-amino), poly(methylcyanoacrylate), poly(ethylcyanoacrylate), poly(butylcyanoacrylate), poly(isobutylcyanoacrylate), poly(isohexylcynaoacrylate), DEAE-methacrylate, DEAE-hexylacrylate, DEAE-acrylamide, DEAE-albumin and DEAE-dextran, polymethylacrylate, polyhexylacrylate, poly(D,L-lactic acid), poly(DL-lactic-co-glycolic acid (PLGA), alginate, and polyethyleneglycol (PEG). Oral formulations for dsRNAs and their preparation are described in detail in U.S. Pat. No. 6,887,906, US Publn. No. 20030027780, and U.S. Pat. No. 6,747,014, each of which is incorporated herein by reference.

[0230] Compositions and formulations for parenteral, intraparenchymal (into the brain), intrathecal, intraventricular or intrahepatic administration may include sterile aqueous solutions which may also contain buffers, diluents and other suitable additives such as, but not limited to, penetration enhancers, carrier compounds and other pharmaceutically acceptable carriers or excipients.

[0231] Pharmaceutical compositions of the present invention include, but are not limited to, solutions, emulsions, and liposome-containing formulations. These compositions may be generated from a variety of components that include, but are not limited to, preformed liquids, self-emulsifying solids and self-emulsifying semisolids. Particularly preferred are formulations that target the liver when treating hepatic disorders such as hepatic carcinoma.

[0232] The pharmaceutical formulations of the present invention, which may conveniently be presented in unit dosage form, may be prepared according to conventional techniques well known in the pharmaceutical industry. Such techniques include the step of bringing into association the active ingredients with the pharmaceutical carrier(s) or excipient(s). In general, the formulations are prepared by uniformly and intimately bringing into association the active ingredients with liquid carriers or finely divided solid carriers or both, and then, if necessary, shaping the product.

[0233] The compositions of the present invention may be formulated into any of many possible dosage forms such as, but not limited to, tablets, capsules, gel capsules, liquid syrups, soft gels, suppositories, and enemas. The compositions of the present invention may also be formulated as suspensions in aqueous, non-aqueous or mixed media. Aqueous suspensions may further contain substances which increase the viscosity of the suspension including, for example, sodium carboxymethylcellulose, sorbitol and/or dextran. The suspension may also contain stabilizers.

[0234] Additional Formulations

[0235] Emulsions

[0236] The compositions of the present invention may be prepared and formulated as emulsions. Emulsions are typically heterogeneous systems of one liquid dispersed in another in the form of droplets usually exceeding 0.1 μm in diameter (see e.g., Ansel's Pharmaceutical Dosage Forms and Drug Delivery Systems, Allen, L V., Popovich N G., and Ansel H C., 2004, Lippincott Williams & Wilkins (8th ed.), New York, N.Y.; Idson, in Pharmaceutical Dosage Forms, Lieberman, Rieger and Banker (Eds.), 1988, Marcel Dekker, Inc., New York, N.Y., volume 1, p. 199; Rosoff, in Pharmaceutical Dosage Forms, Lieberman, Rieger and Banker (Eds.), 1988, Marcel Dekker, Inc., New York, N.Y., Volume 1, p. 245; Block in Pharmaceutical Dosage Forms, Lieberman, Rieger and Banker (Eds.), 1988, Marcel Dekker, Inc., New York, N.Y., volume 2, p. 335; Higuchi et al., in Remington's Pharmaceutical Sciences, Mack Publishing Co., Easton, Pa., 1985, p. 301). Emulsions are often biphasic systems comprising two immiscible liquid phases intimately mixed and dispersed with each other. In general, emulsions may be of either the water-in-oil (w/o) or the oil-in-water (o/w) variety. When an aqueous phase is finely divided into and dispersed as minute droplets into a bulk oily phase, the resulting composition is called a water-in-oil (w/o) emulsion. Alternatively, when an oily phase is finely divided into and dispersed as minute droplets into a bulk aqueous phase, the resulting composition is called an oil-in-water (o/w) emulsion. Emulsions may contain additional components in addition to the dispersed phases, and the active drug which may be present as a solution in either the aqueous phase, oily phase or itself as a separate phase. Pharmaceutical excipients such as emulsifiers, stabilizers, dyes, and anti-oxidants may also be present in emulsions as needed. Pharmaceutical emulsions may also be multiple emulsions that are comprised of more than two phases such as, for example, in the case of oil-in-water-in-oil (o/w/o) and water-in-oil-in-water (w/o/w) emulsions. Such complex formulations often provide certain advantages that simple binary emulsions do not. Multiple emulsions in which individual oil droplets of an o/w emulsion enclose small water droplets constitute a w/o/w emulsion. Likewise a system of oil droplets enclosed in globules of water stabilized in an oily continuous phase provides an o/w/o emulsion.

[0237] Emulsions are characterized by little or no thermodynamic stability. Often, the dispersed or discontinuous phase of the emulsion is well dispersed into the external or continuous phase and maintained in this form through the means of emulsifiers or the viscosity of the formulation. Either of the phases of the emulsion may be a semisolid or a solid, as is the case of emulsion-style ointment bases and creams. Other means of stabilizing emulsions entail the use of emulsifiers that may be incorporated into either phase of the emulsion. Emulsifiers may broadly be classified into four categories: synthetic surfactants, naturally occurring emulsifiers, absorption bases, and finely dispersed solids (see e.g., Ansel's Pharmaceutical Dosage Forms and Drug Delivery Systems, Allen, L V., Popovich N G., and Ansel H C., 2004, Lippincott Williams & Wilkins (8th ed.), New York, N.Y.; Idson, in Pharmaceutical Dosage Forms, Lieberman, Rieger and Banker (Eds.), 1988, Marcel Dekker, Inc., New York, N.Y., volume 1, p. 199).

[0238] Synthetic surfactants, also known as surface active agents, have found wide applicability in the formulation of emulsions and have been reviewed in the literature (see e.g., Ansel's Pharmaceutical Dosage Forms and Drug Delivery Systems, Allen, L V., Popovich N G., and Ansel H C., 2004, Lippincott Williams & Wilkins (8th ed.), New York, N.Y.; Rieger, in Pharmaceutical Dosage Forms, Lieberman, Rieger and Banker (Eds.), 1988, Marcel Dekker, Inc., New York, N.Y., volume 1, p. 285; Idson, in Pharmaceutical Dosage Forms, Lieberman, Rieger and Banker (Eds.), Marcel Dekker, Inc., New York, N.Y., 1988, volume 1, p. 199). Surfactants are typically amphiphilic and comprise a hydrophilic and a hydrophobic portion. The ratio of the hydrophilic to the hydrophobic nature of the surfactant has been termed the hydrophile/lipophile balance (HLB) and is a valuable tool in categorizing and selecting surfactants in the preparation of formulations. Surfactants may be classified into different classes based on the nature of the hydrophilic group: nonionic, anionic, cationic and amphoteric (see e.g., Ansel's Pharmaceutical Dosage Forms and Drug Delivery Systems, Allen, L V., Popovich N G., and Ansel H C., 2004, Lippincott Williams & Wilkins (8th ed.), New York, N.Y. Rieger, in Pharmaceutical Dosage Forms, Lieberman, Rieger and Banker (Eds.), 1988, Marcel Dekker, Inc., New York, N.Y., volume 1, p. 285).

[0239] Naturally occurring emulsifiers used in emulsion formulations include lanolin, beeswax, phosphatides, lecithin and acacia. Absorption bases possess hydrophilic properties such that they can soak up water to form w/o emulsions yet retain their semisolid consistencies, such as anhydrous lanolin and hydrophilic petrolatum. Finely divided solids have also been used as good emulsifiers especially in combination with surfactants and in viscous preparations. These include polar inorganic solids, such as heavy metal hydroxides, nonswelling clays such as bentonite, attapulgite, hectorite, kaolin, montmorillonite, colloidal aluminum silicate and colloidal magnesium aluminum silicate, pigments and nonpolar solids such as carbon or glyceryl tristearate.

[0240] A large variety of non-emulsifying materials are also included in emulsion formulations and contribute to the properties of emulsions. These include fats, oils, waxes, fatty acids, fatty alcohols, fatty esters, humectants, hydrophilic colloids, preservatives and antioxidants (Block, in Pharmaceutical Dosage Forms, Lieberman, Rieger and Banker (Eds.), 1988, Marcel Dekker, Inc., New York, N.Y., volume 1, p. 335; Idson, in Pharmaceutical Dosage Forms, Lieberman, Rieger and Banker (Eds.), 1988, Marcel Dekker, Inc., New York, N.Y., volume 1, p. 199).

[0241] Hydrophilic colloids or hydrocolloids include naturally occurring gums and synthetic polymers such as polysaccharides (for example, acacia, agar, alginic acid, carrageenan, guar gum, karaya gum, and tragacanth), cellulose derivatives (for example, carboxymethylcellulose and carboxypropylcellulose), and synthetic polymers (for example, carbomers, cellulose ethers, and carboxyvinyl polymers). These disperse or swell in water to form colloidal solutions that stabilize emulsions by forming strong interfacial films around the dispersed-phase droplets and by increasing the viscosity of the external phase.

[0242] Since emulsions often contain a number of ingredients such as carbohydrates, proteins, sterols and phosphatides that may readily support the growth of microbes, these formulations often incorporate preservatives. Commonly used preservatives included in emulsion formulations include methyl paraben, propyl paraben, quaternary ammonium salts, benzalkonium chloride, esters of p-hydroxybenzoic acid, and boric acid. Antioxidants are also commonly added to emulsion formulations to prevent deterioration of the formulation. Antioxidants used may be free radical scavengers such as tocopherols, alkyl gallates, butylated hydroxyanisole, butylated hydroxytoluene, or reducing agents such as ascorbic acid and sodium metabisulfite, and antioxidant synergists such as citric acid, tartaric acid, and lecithin.

[0243] The application of emulsion formulations via dermatological, oral and parenteral routes and methods for their manufacture have been reviewed in the literature (see e.g., Ansel's Pharmaceutical Dosage Forms and Drug Delivery Systems, Allen, L V., Popovich N G., and Ansel H C., 2004, Lippincott Williams & Wilkins (8th ed.), New York, N.Y.; Idson, in Pharmaceutical Dosage Forms, Lieberman, Rieger and Banker (Eds.), 1988, Marcel Dekker, Inc., New York, N.Y., volume 1, p. 199). Emulsion formulations for oral delivery have been very widely used because of ease of formulation, as well as efficacy from an absorption and bioavailability standpoint (see e.g., Ansel's Pharmaceutical Dosage Forms and Drug Delivery Systems, Allen, L V., Popovich N G., and Ansel H C., 2004, Lippincott Williams & Wilkins (8th ed.), New York, N.Y.; Rosoff, in Pharmaceutical Dosage Forms, Lieberman, Rieger and Banker (Eds.), 1988, Marcel Dekker, Inc., New York, N.Y., volume 1, p. 245; Idson, in Pharmaceutical Dosage Forms, Lieberman, Rieger and Banker (Eds.), 1988, Marcel Dekker, Inc., New York, N.Y., volume 1, p. 199). Mineral-oil base laxatives, oil-soluble vitamins and high fat nutritive preparations are among the materials that have commonly been administered orally as o/w emulsions.

[0244] In one embodiment of the present invention, the compositions of iRNAs and nucleic acids are formulated as microemulsions. A microemulsion may be defined as a system of water, oil and amphiphile which is a single optically isotropic and thermodynamically stable liquid solution (see e.g., Ansel's Pharmaceutical Dosage Forms and Drug Delivery Systems, Allen, L V., Popovich N G., and Ansel H C., 2004, Lippincott Williams & Wilkins (8th ed.), New York, N.Y.; Rosoff, in Pharmaceutical Dosage Forms, Lieberman, Rieger and Banker (Eds.), 1988, Marcel Dekker, Inc., New York, N.Y., volume 1, p. 245). Typically microemulsions are systems that are prepared by first dispersing an oil in an aqueous surfactant solution and then adding a sufficient amount of a fourth component, generally an intermediate chain-length alcohol to form a transparent system. Therefore, microemulsions have also been described as thermodynamically stable, isotropically clear dispersions of two immiscible liquids that are stabilized by interfacial films of surface-active molecules (Leung and Shah, in: Controlled Release of Drugs: Polymers and Aggregate Systems, Rosoff, M., Ed., 1989, VCH Publishers, New York, pages 185-215). Microemulsions commonly are prepared via a combination of three to five components that include oil, water, surfactant, cosurfactant and electrolyte. Whether the microemulsion is of the water-in-oil (w/o) or an oil-in-water (o/w) type is dependent on the properties of the oil and surfactant used and on the structure and geometric packing of the polar heads and hydrocarbon tails of the surfactant molecules (Schott, in Remington's Pharmaceutical Sciences, Mack Publishing Co., Easton, Pa., 1985, p. 271).

[0245] The phenomenological approach utilizing phase diagrams has been extensively studied and has yielded a comprehensive knowledge, to one skilled in the art, of how to formulate microemulsions (see e.g., Ansel's Pharmaceutical Dosage Forms and Drug Delivery Systems, Allen, L V., Popovich N G., and Ansel H C., 2004, Lippincott Williams & Wilkins (8th ed.), New York, N.Y.; Rosoff, in Pharmaceutical Dosage Forms, Lieberman, Rieger and Banker (Eds.), 1988, Marcel Dekker, Inc., New York, N.Y., volume 1, p. 245; Block, in Pharmaceutical Dosage Forms, Lieberman, Rieger and Banker (Eds.), 1988, Marcel Dekker, Inc., New York, N.Y., volume 1, p. 335). Compared to conventional emulsions, microemulsions offer the advantage of solubilizing water-insoluble drugs in a formulation of thermodynamically stable droplets that are formed spontaneously.

[0246] Surfactants used in the preparation of microemulsions include, but are not limited to, ionic surfactants, non-ionic surfactants, Brij 96, polyoxyethylene oleyl ethers, polyglycerol fatty acid esters, tetraglycerol monolaurate (ML310), tetraglycerol monooleate (M0310), hexaglycerol monooleate (PO310), hexaglycerol pentaoleate (PO500), decaglycerol monocaprate (MCA750), decaglycerol monooleate (M0750), decaglycerol sequioleate (SO750), decaglycerol decaoleate (DAO750), alone or in combination with cosurfactants.

[0247] The cosurfactant, usually a short-chain alcohol such as ethanol, 1-propanol, and 1-butanol, serves to increase the interfacial fluidity by penetrating into the surfactant film and consequently creating a disordered film because of the void space generated among surfactant molecules. Microemulsions may, however, be prepared without the use of cosurfactants and alcohol-free self-emulsifying microemulsion systems are known in the art. The aqueous phase may typically be, but is not limited to, water, an aqueous solution of the drug, glycerol, PEG300, PEG400, polyglycerols, propylene glycols, and derivatives of ethylene glycol. The oil phase may include, but is not limited to, materials such as Captex 300, Captex 355, Capmul MCM, fatty acid esters, medium chain (C8-C12) mono, di, and tri-glycerides, polyoxyethylated glyceryl fatty acid esters, fatty alcohols, polyglycolized glycerides, saturated polyglycolized C8-C10 glycerides, vegetable oils and silicone oil.

[0248] Microemulsions are particularly of interest from the standpoint of drug solubilization and the enhanced absorption of drugs. Lipid based microemulsions (both o/w and w/o) have been proposed to enhance the oral bioavailability of drugs, including peptides (see e.g., U.S. Pat. Nos. 6,191,105; 7,063,860; 7,070,802; 7,157,099; Constantinides et al., Pharmaceutical Research, 1994, 11, 1385-1390; Ritschel, Meth. Find. Exp. Clin. Pharmacol., 1993, 13, 205). Microemulsions afford advantages of improved drug solubilization, protection of drug from enzymatic hydrolysis, possible enhancement of drug absorption due to surfactant-induced alterations in membrane fluidity and permeability, ease of preparation, ease of oral administration over solid dosage forms, improved clinical potency, and decreased toxicity (see e.g., U.S. Pat. Nos. 6,191,105; 7,063,860; 7,070,802; 7,157,099; Constantinides et al., Pharmaceutical Research, 1994, 11, 1385; Ho et al., J. Pharm. Sci., 1996, 85, 138-143). Often microemulsions may form spontaneously when their components are brought together at ambient temperature. This may be particularly advantageous when formulating thermolabile drugs, peptides or iRNAs. Microemulsions have also been effective in the transdermal delivery of active components in both cosmetic and pharmaceutical applications. It is expected that the microemulsion compositions and formulations of the present invention will facilitate the increased systemic absorption of iRNAs and nucleic acids from the gastrointestinal tract, as well as improve the local cellular uptake of iRNAs and nucleic acids.

[0249] Microemulsions of the present invention may also contain additional components and additives such as sorbitan monostearate (Grill 3), Labrasol, and penetration enhancers to improve the properties of the formulation and to enhance the absorption of the iRNAs and nucleic acids of the present invention. Penetration enhancers used in the microemulsions of the present invention may be classified as belonging to one of five broad categories—surfactants, fatty acids, bile salts, chelating agents, and non-chelating non-surfactants (Lee et al., Critical Reviews in Therapeutic Drug Carrier Systems, 1991, p. 92). Each of these classes has been discussed above.

[0250] Penetration Enhancers

[0251] In one embodiment, the present invention employs various penetration enhancers to effect the efficient delivery of nucleic acids, particularly iRNAs, to the skin of animals. Most drugs are present in solution in both ionized and nonionized forms. However, usually only lipid soluble or lipophilic drugs readily cross cell membranes. It has been discovered that even non-lipophilic drugs may cross cell membranes if the membrane to be crossed is treated with a penetration enhancer. In addition to aiding the diffusion of non-lipophilic drugs across cell membranes, penetration enhancers also enhance the permeability of lipophilic drugs.

[0252] Penetration enhancers may be classified as belonging to one of five broad categories, i.e., surfactants, fatty acids, bile salts, chelating agents, and non-chelating non-surfactants (see e.g., Malmsten, M. Surfactants and polymers in drug delivery, Informa Health Care, New York, N.Y., 2002; Lee et al., Critical Reviews in Therapeutic Drug Carrier Systems, 1991, p. 92). Each of the above mentioned classes of penetration enhancers are described below in greater detail.

[0253] Surfactants:

[0254] In connection with the present invention, surfactants (or “surface-active agents”) are chemical entities which, when dissolved in an aqueous solution, reduce the surface tension of the solution or the interfacial tension between the aqueous solution and another liquid, with the result that absorption of iRNAs through the mucosa is enhanced. In addition to bile salts and fatty acids, these penetration enhancers include, for example, sodium lauryl sulfate, polyoxyethylene-9-lauryl ether and polyoxyethylene-20-cetyl ether) (see e.g., Malmsten, M. Surfactants and polymers in drug delivery, Informa Health Care, New York, N.Y., 2002; Lee et al., Critical Reviews in Therapeutic Drug Carrier Systems, 1991, p. 92); and perfluorochemical emulsions, such as FC-43. Takahashi et al., J. Pharm. Pharmacol., 1988, 40, 252).

[0255] Fatty Acids:

[0256] Various fatty acids and their derivatives which act as penetration enhancers include, for example, oleic acid, lauric acid, capric acid (n-decanoic acid), myristic acid, palmitic acid, stearic acid, linoleic acid, linolenic acid, dicaprate, tricaprate, monoolein (1-monooleoyl-rac-glycerol), dilaurin, caprylic acid, arachidonic acid, glycerol 1-monocaprate, 1-dodecylazacycloheptan-2-one, acylcarnitines, acylcholines, C₁₋₂₀ alkyl esters thereof (e.g., methyl, isopropyl and t-butyl), and mono- and di-glycerides thereof (i.e., oleate, laurate, caprate, myristate, palmitate, stearate, linoleate, etc.) (see e.g., Touitou, E., et al. Enhancement in Drug Delivery, CRC Press, Danvers, Mass., 2006; Lee et al., Critical Reviews in Therapeutic Drug Carrier Systems, 1991, p. 92; Muranishi, Critical Reviews in Therapeutic Drug Carrier Systems, 1990, 7, 1-33; El Hariri et al., J. Pharm. Pharmacol., 1992, 44, 651-654).

[0257] Bile Salts:

[0258] The physiological role of bile includes the facilitation of dispersion and absorption of lipids and fat-soluble vitamins (see e.g., Malmsten, M. Surfactants and polymers in drug delivery, Informa Health Care, New York, N.Y., 2002; Brunton, Chapter 38 in: Goodman & Gilman's The Pharmacological Basis of Therapeutics, 9th Ed., Hardman et al. Eds., McGraw-Hill, New York, 1996, pp. 934-935). Various natural bile salts, and their synthetic derivatives, act as penetration enhancers. Thus the term “bile salts” includes any of the naturally occurring components of bile as well as any of their synthetic derivatives. Suitable bile salts include, for example, cholic acid (or its pharmaceutically acceptable sodium salt, sodium cholate), dehydrocholic acid (sodium dehydrocholate), deoxycholic acid (sodium deoxycholate), glucholic acid (sodium glucholate), glycholic acid (sodium glycocholate), glycodeoxycholic acid (sodium glycodeoxycholate), taurocholic acid (sodium taurocholate), taurodeoxycholic acid (sodium taurodeoxycholate), chenodeoxycholic acid (sodium chenodeoxycholate), ursodeoxycholic acid (UDCA), sodium tauro-24,25-dihydro-fusidate (STDHF), sodium glycodihydrofusidate and polyoxyethylene-9-lauryl ether (POE) (see e.g., Malmsten, M. Surfactants and polymers in drug delivery, Informa Health Care, New York, N.Y., 2002; Lee et al., Critical Reviews in Therapeutic Drug Carrier Systems, 1991, page 92; Swinyard, Chapter 39 In: Remington's Pharmaceutical Sciences, 18th Ed., Gennaro, ed., Mack Publishing Co., Easton, Pa., 1990, pages 782-783; Muranishi, Critical Reviews in Therapeutic Drug Carrier Systems, 1990, 7, 1-33; Yamamoto et al., J. Pharm. Exp. Ther., 1992, 263, 25; Yamashita et al., J. Pharm. Sci., 1990, 79, 579-583).

[0259] Chelating Agents:

[0260] Chelating agents, as used in connection with the present invention, can be defined as compounds that remove metallic ions from solution by forming complexes therewith, with the result that absorption of iRNAs through the mucosa is enhanced. With regards to their use as penetration enhancers in the present invention, chelating agents have the added advantage of also serving as DNase inhibitors, as most characterized DNA nucleases require a divalent metal ion for catalysis and are thus inhibited by chelating agents (Jarrett, J. Chromatogr., 1993, 618, 315-339). Suitable chelating agents include but are not limited to disodium ethylenediaminetetraacetate (EDTA), citric acid, salicylates (e.g., sodium salicylate, 5-methoxysalicylate and homovanilate), N-acyl derivatives of collagen, laureth-9 and N-amino acyl derivatives of beta-diketones (enamines)(see e.g., Katdare, A. et al., Excipient development for pharmaceutical, biotechnology, and drug delivery, CRC Press, Danvers, Mass., 2006; Lee et al., Critical Reviews in Therapeutic Drug Carrier Systems, 1991, page 92; Muranishi, Critical Reviews in Therapeutic Drug Carrier Systems, 1990, 7, 1-33; Buur et al., J. Control Rel., 1990, 14, 43-51).

[0261] Non-Chelating Non-Surfactants:

[0262] As used herein, non-chelating non-surfactant penetration enhancing compounds can be defined as compounds that demonstrate insignificant activity as chelating agents or as surfactants but that nonetheless enhance absorption of iRNAs through the alimentary mucosa (see e.g., Muranishi, Critical Reviews in Therapeutic Drug Carrier Systems, 1990, 7, 1-33). This class of penetration enhancers include, for example, unsaturated cyclic ureas, 1-alkyl- and 1-alkenylazacyclo-alkanone derivatives (Lee et al., Critical Reviews in Therapeutic Drug Carrier Systems, 1991, page 92); and non-steroidal anti-inflammatory agents such as diclofenac sodium, indomethacin and phenylbutazone (Yamashita et al., J. Pharm. Pharmacol., 1987, 39, 621-626).

[0263] Agents that enhance uptake of iRNAs at the cellular level may also be added to the pharmaceutical and other compositions of the present invention. For example, cationic lipids, such as lipofectin (Junichi et al, U.S. Pat. No. 5,705,188), cationic glycerol derivatives, and polycationic molecules, such as polylysine (Lollo et al., PCT Application WO 97/30731), are also known to enhance the cellular uptake of dsRNAs. Examples of commercially available transfection reagents include, for example Lipofectamine™ (Invitrogen; Carlsbad, Calif.), Lipofectamine 2000™ (Invitrogen; Carlsbad, Calif.), 293Fectin™ (Invitrogen; Carlsbad, Calif.), Cellfectin™ (Invitrogen; Carlsbad, Calif.), DMRIE-C™ (Invitrogen; Carlsbad, Calif.), FreeStyle™ MAX (Invitrogen; Carlsbad, Calif.), Lipofectamine™ 2000 CD (Invitrogen; Carlsbad, Calif.), Lipofectamine™ (Invitrogen; Carlsbad, Calif.), RNAiMAX (Invitrogen; Carlsbad, Calif.), Oligofectamine™ (Invitrogen; Carlsbad, Calif.), Optifect™ (Invitrogen; Carlsbad, Calif.), X-tremeGENE Q2 Transfection Reagent (Roche; Grenzacherstrasse, Switzerland), DOTAP Liposomal Transfection Reagent (Grenzacherstrasse, Switzerland), DOSPER Liposomal Transfection Reagent (Grenzacherstrasse, Switzerland), or Fugene (Grenzacherstrasse, Switzerland), Transfectam® Reagent (Promega; Madison, Wis.), TransFast™ Transfection Reagent (Promega; Madison, Wis.), Tfx™-20 Reagent (Promega; Madison, Wis.), Tfx™-50 Reagent (Promega; Madison, Wis.), DreamFect™ (OZ Biosciences; Marseille, France), EcoTransfect (OZ Biosciences; Marseille, France), TransPassa D1 Transfection Reagent (New England Biolabs; Ipswich, Mass., USA), LyoVec™/LipoGen™ (Invivogen; San Diego, Calif., USA), PerFectin Transfection Reagent (Genlantis; San Diego, Calif., USA), NeuroPORTER Transfection Reagent (Genlantis; San Diego, Calif., USA), GenePORTER Transfection reagent (Genlantis; San Diego, Calif., USA), GenePORTER 2 Transfection reagent (Genlantis; San Diego, Calif., USA), Cytofectin Transfection Reagent (Genlantis; San Diego, Calif., USA), BaculoPORTER Transfection Reagent (Genlantis; San Diego, Calif., USA), TroganPORTER™ transfection Reagent (Genlantis; San Diego, Calif., USA), RiboFect (Bioline; Taunton, Mass., USA), PlasFect (Bioline; Taunton, Mass., USA), UniFECTOR (B-Bridge International; Mountain View, Calif., USA), SureFECTOR (B-Bridge International; Mountain View, Calif., USA), or HiFect™ (B-Bridge International, Mountain View, Calif., USA), among others.

[0264] Other agents may be utilized to enhance the penetration of the administered nucleic acids, including glycols such as ethylene glycol and propylene glycol, pyrrols such as 2-pyrrol, azones, and terpenes such as limonene and menthone.

[0265] Carriers

[0266] Certain compositions of the present invention also incorporate carrier compounds in the formulation. As used herein, “carrier compound” or “carrier” can refer to a nucleic acid, or analog thereof, which is inert (i.e., does not possess biological activity per se) but is recognized as a nucleic acid by in vivo processes that reduce the bioavailability of a nucleic acid having biological activity by, for example, degrading the biologically active nucleic acid or promoting its removal from circulation. The coadministration of a nucleic acid and a carrier compound, typically with an excess of the latter substance, can result in a substantial reduction of the amount of nucleic acid recovered in the liver, kidney or other extracirculatory reservoirs, presumably due to competition between the carrier compound and the nucleic acid for a common receptor. For example, the recovery of a partially phosphorothioate dsRNA in hepatic tissue can be reduced when it is coadministered with polyinosinic acid, dextran sulfate, polycytidic acid or 4-acetamido-4′ isothiocyano-stilbene-2,2′-disulfonic acid (Miyao et al., DsRNA Res. Dev., 1995, 5, 115-121; Takakura et al., DsRNA & Nucl. Acid Drug Dev., 1996, 6, 177-183.

[0267] Excipients

[0268] In contrast to a carrier compound, a “pharmaceutical carrier” or “excipient” is a pharmaceutically acceptable solvent, suspending agent or any other pharmacologically inert vehicle for delivering one or more nucleic acids to an animal. The excipient may be liquid or solid and is selected, with the planned manner of administration in mind, so as to provide for the desired bulk, consistency, etc., when combined with a nucleic acid and the other components of a given pharmaceutical composition. Typical pharmaceutical carriers include, but are not limited to, binding agents (e.g., pregelatinized maize starch, polyvinylpyrrolidone or hydroxypropyl methylcellulose, etc.); fillers (e.g., lactose and other sugars, microcrystalline cellulose, pectin, gelatin, calcium sulfate, ethyl cellulose, polyacrylates or calcium hydrogen phosphate, etc.); lubricants (e.g., magnesium stearate, talc, silica, colloidal silicon dioxide, stearic acid, metallic stearates, hydrogenated vegetable oils, corn starch, polyethylene glycols, sodium benzoate, sodium acetate, etc.); disintegrants (e.g., starch, sodium starch glycolate, etc.); and wetting agents (e.g., sodium lauryl sulphate, etc).

[0269] Pharmaceutically acceptable organic or inorganic excipients suitable for non-parenteral administration which do not deleteriously react with nucleic acids can also be used to formulate the compositions of the present invention. Suitable pharmaceutically acceptable carriers include, but are not limited to, water, salt solutions, alcohols, polyethylene glycols, gelatin, lactose, amylose, magnesium stearate, talc, silicic acid, viscous paraffin, hydroxymethylcellulose, polyvinylpyrrolidone and the like.

[0270] Formulations for topical administration of nucleic acids may include sterile and non-sterile aqueous solutions, non-aqueous solutions in common solvents such as alcohols, or solutions of the nucleic acids in liquid or solid oil bases. The solutions may also contain buffers, diluents and other suitable additives. Pharmaceutically acceptable organic or inorganic excipients suitable for non-parenteral administration which do not deleteriously react with nucleic acids can be used.

[0271] Suitable pharmaceutically acceptable excipients include, but are not limited to, water, salt solutions, alcohol, polyethylene glycols, gelatin, lactose, amylose, magnesium stearate, talc, silicic acid, viscous paraffin, hydroxymethylcellulose, polyvinylpyrrolidone and the like.

[0272] Other Components

[0273] The compositions of the present invention may additionally contain other adjunct components conventionally found in pharmaceutical compositions, at their art-established usage levels. Thus, for example, the compositions may contain additional, compatible, pharmaceutically-active materials such as, for example, antipruritics, astringents, local anesthetics or anti-inflammatory agents, or may contain additional materials useful in physically formulating various dosage forms of the compositions of the present invention, such as dyes, flavoring agents, preservatives, antioxidants, opacifiers, thickening agents and stabilizers. However, such materials, when added, should not unduly interfere with the biological activities of the components of the compositions of the present invention. The formulations can be sterilized and, if desired, mixed with auxiliary agents, e.g., lubricants, preservatives, stabilizers, wetting agents, emulsifiers, salts for influencing osmotic pressure, buffers, colorings, flavorings and/or aromatic substances and the like which do not deleteriously interact with the nucleic acid(s) of the formulation.

[0274] Aqueous suspensions may contain substances that increase the viscosity of the suspension including, for example, sodium carboxymethylcellulose, sorbitol and/or dextran. The suspension may also contain stabilizers.

[0275] In some embodiments, pharmaceutical compositions featured in the invention include (a) one or more iRNA compounds and (b) one or more biologic agents which function by a non-RNAi mechanism. Examples of such biologics include, biologics that target one or more of PD-1, PD-L1, or B7-H1 (CD80) (e.g., monoclonal antibodies against PD-1, PD-L1, or B7-H1), or one or more recombinant cytokines (e.g., IL6, IFN-γ, and TNF).

[0276] Toxicity and therapeutic efficacy of such compounds can be determined by standard pharmaceutical procedures in cell cultures or experimental animals, e.g., for determining the LD50 (the dose lethal to 50% of the population) and the ED50 (the dose therapeutically effective in 50% of the population). The dose ratio between toxic and therapeutic effects is the therapeutic index and it can be expressed as the ratio LD50/ED50. Compounds that exhibit high therapeutic indices are preferred.

[0277] The data obtained from cell culture assays and animal studies can be used in formulating a range of dosage for use in humans. The dosage of compositions featured in the invention lies generally within a range of circulating concentrations that include the ED50 with little or no toxicity. The dosage may vary within this range depending upon the dosage form employed and the route of administration utilized. For any compound used in the methods featured in the invention, the therapeutically effective dose can be estimated initially from cell culture assays. A dose may be formulated in animal models to achieve a circulating plasma concentration range of the compound or, when appropriate, of the polypeptide product of a target sequence (e.g., achieving a decreased concentration of the polypeptide) that includes the IC50 (i.e., the concentration of the test compound which achieves a half-maximal inhibition of symptoms) as determined in cell culture. Such information can be used to more accurately determine useful doses in humans. Levels in plasma may be measured, for example, by high performance liquid chromatography.

[0278] In addition to their administration, as discussed above, the siRNAs featured in the invention can be administered in combination with other known agents effective in treatment of pathological processes mediated by PCSK9 expression. In any event, the administering physician can adjust the amount and timing of iRNA administration on the basis of results observed using standard measures of efficacy known in the art or described herein.

[0279] Methods using siRNAs Targeting PCSK9

[0280] In one aspect, the invention provides use of a siRNA for inhibiting the expression of the PCSK9 gene in a mammal. The method includes administering a composition of the invention to the mammal such that expression of the target PCSK9 gene is decreased. In some embodiments, PCSK9 expression is decreased for an extended duration, e.g., at least one week, two weeks, three weeks, or four weeks or longer. For example, in certain instances, expression of the PCSK9 gene is suppressed by at least about 5%, 10%, 15%, 20%, 25%, 30%, 35%, 40%, 45%, or 50% by administration of a siRNA described herein. In some embodiments, the PCSK9 gene is suppressed by at least about 60%, 70%, or 80% by administration of the siRNA. In some embodiments, the PCSK9 gene is suppressed by at least about 85%, 90%, or 95% by administration of the double-stranded oligonucleotide.

[0281] The methods and compositions described herein can be used to treat diseases and conditions that can be modulated by down regulating PCSK9 gene expression. For example, the compositions described herein can be used to treat hyperlipidemia and other forms of lipid imbalance such as hypercholesterolemia, hypertriglyceridemia and the pathological conditions associated with these disorders such as heart and circulatory diseases. In some embodiments, the method includes administering an effective amount of a PCSK9 siRNA to a patient having a heterozygous LDLR genotype.

[0282] Therefore, the invention also relates to the use of a siRNA for the treatment of a PCSK9-mediated disorder or disease. For example, a siRNA is used for treatment of a hyperlipidemia.

[0283] The effect of the decreased PCSK9 gene preferably results in a decrease in LDLc (low density lipoprotein cholesterol) levels in the blood, and more particularly in the serum, of the mammal. In some embodiments, LDLc levels are decreased by at least 10%, 15%, 20%, 25%, 30%, 40%, 50%, or 60%, or more, as compared to pretreatment levels.

[0284] The method includes administering a siRNA to the subject to be treated. When the organism to be treated is a mammal such as a human, the composition can be administered by any means known in the art including, but not limited to oral or parenteral routes, including intravenous, intramuscular, subcutaneous, transdermal, and airway (aerosol) administration. In some embodiments, the compositions are administered by intravenous infusion or injection.

[0285] The method includes administering a siRNA, e.g., a dose sufficient to depress levels of PCSK9 mRNA for at least 5, more preferably 7, 10, 14, 21, 25, 30 or 40 days; and optionally, administering a second single dose of dsRNA, wherein the second single dose is administered at least 5, more preferably 7, 10, 14, 21, 25, 30 or 40 days after the first single dose is administered, thereby inhibiting the expression of the PCSK9 gene in a subject.

[0286] In one embodiment, doses of siRNA are administered not more than once every four weeks, not more than once every three weeks, not more than once every two weeks, or not more than once every week. In another embodiment, the administrations can be maintained for one, two, three, or six months, or one year or longer.

[0287] In another embodiment, administration can be provided when Low Density Lipoprotein cholesterol (LDLc) levels reach or surpass a predetermined minimal level, such as greater than 70 mg/dL, 130 mg/dL, 150 mg/dL, 200 mg/dL, 300 mg/dL, or 400 mg/dL.

[0288] In general, the siRNA does not activate the immune system, e.g., it does not increase cytokine levels, such as TNF-alpha or IFN-alpha levels. For example, when measured by an assay, such as an in vitro PBMC assay, such as described herein, the increase in levels of TNF-alpha or IFN-alpha, is less than 30%, 20%, or 10% of control cells treated with a control dsRNA, such as a dsRNA that does not target PCSK9.

[0289] For example, a subject can be administered a therapeutic amount of siRNA, such as 0.5 mg/kg, 1.0 mg/kg, 1.5 mg/kg, 2.0 mg/kg, or 2.5 mg/kg dsRNA. The siRNA can be administered by intravenous infusion over a period of time, such as over a 5 minute, 10 minute, 15 minute, 20 minute, or 25 minute period. The administration is repeated, for example, on a regular basis, such as biweekly (i.e., every two weeks) for one month, two months, three months, four months or longer. After an initial treatment regimen, the treatments can be administered on a less frequent basis. For example, after administration biweekly for three months, administration can be repeated once per month, for six months or a year or longer. Administration of the siRNA can reduce PCSK9 levels, e.g., in a cell, tissue, blood, urine or other compartment of the patient by at least 10%, at least 15%, at least 20%, at least 25%, at least 30%, at least 40%, at least 50%, at least 60%, at least 70%, at least 80% or at least 90% or more.

[0290] Before administration of a full dose of the iRNA, patients can be administered a smaller dose, such as a 5% infusion reaction, and monitored for adverse effects, such as an allergic reaction, or for elevated lipid levels or blood pressure. In another example, the patient can be monitored for unwanted immunostimulatory effects, such as increased cytokine (e.g., TNF-alpha or INF-alpha) levels.

[0291] A treatment or preventive effect is evident when there is a statistically significant improvement in one or more parameters of disease status, or by a failure to worsen or to develop symptoms where they would otherwise be anticipated. As an example, a favorable change of at least 10% in a measurable parameter of disease, and preferably at least 20%, 30%, 40%, 50% or more can be indicative of effective treatment. Efficacy for a given siRNA drug or formulation of that drug can also be judged using an experimental animal model for the given disease as known in the art. When using an experimental animal model, efficacy of treatment is evidenced when a statistically significant reduction in a marker or symptom is observed.

[0292] Additional Agents

[0293] In further embodiments, administration of a siRNA is administered in combination an additional therapeutic agent. The siRNA and an additional therapeutic agent can be administered in combination in the same composition, e.g., parenterally, or the additional therapeutic agent can be administered as part of a separate composition or by another method described herein.

[0294] Examples of additional therapeutic agents include those known to treat an agent known to treat a lipid disorders, such as hypercholesterolemia, atherosclerosis or dyslipidemia. For example, a siRNA featured in the invention can be administered with, e.g., an HMG-CoA reductase inhibitor (e.g., a statin), a fibrate, a bile acid sequestrant, niacin, an antiplatelet agent, an angiotensin converting enzyme inhibitor, an angiotensin II receptor antagonist (e.g., losartan potassium, such as Merck & Co.'s Cozaar®), an acylCoA cholesterol acetyltransferase (ACAT) inhibitor, a cholesterol absorption inhibitor, a cholesterol ester transfer protein (CETP) inhibitor, a microsomal triglyceride transfer protein (MTTP) inhibitor, a cholesterol modulator, a bile acid modulator, a peroxisome proliferation activated receptor (PPAR) agonist, a gene-based therapy, a composite vascular protectant (e.g., AGI-1067, from Atherogenics), a glycoprotein IIb/IIIa inhibitor, aspirin or an aspirin-like compound, an IBAT inhibitor (e.g., S-8921, from Shionogi), a squalene synthase inhibitor, or a monocyte chemoattractant protein (MCP)-I inhibitor. Exemplary HMG-CoA reductase inhibitors include atorvastatin (Pfizer's Lipitor®/Tahor/Sortis/Torvast/Cardyl), pravastatin (Bristol-Myers Squibb's Pravachol, Sankyo's Mevalotin/Sanaprav), simvastatin (Merck's Zocor®/Sinvacor, Boehringer Ingelheim's Denan, Banyu's Lipovas), lovastatin (Merck's Mevacor/Mevinacor, Bexal's Lovastatina, Cepa; Schwarz Pharma's Liposcler), fluvastatin (Novartis' Lescol®/Locol/Lochol, Fujisawa's Cranoc, Solvay's Digaril), cerivastatin (Bayer's Lipobay/GlaxoSmithKline's Baycol), rosuvastatin (AstraZeneca's Crestor®), and pitivastatin (itavastatin/risivastatin) (Nissan Chemical, Kowa Kogyo, Sankyo, and Novartis). Exemplary fibrates include, e.g., bezafibrate (e.g., Roche's Befizal®/Cedur®/Bezalip®, Kissei's Bezatol), clofibrate (e.g., Wyeth's Atromid-S®), fenofibrate (e.g., Fournier's Lipidil/Lipantil, Abbott's Tricor®, Takeda's Lipantil, generics), gemfibrozil (e.g., Pfizer's Lopid/Lipur) and ciprofibrate (Sanofi-Synthelabo's Modalim®). Exemplary bile acid sequestrants include, e.g., cholestyramine (Bristol-Myers Squibb's Questran® and Questran Light™), colestipol (e.g., Pharmacia's Colestid), and colesevelam (Genzyme/Sankyo's WelChol™). Exemplary niacin therapies include, e.g., immediate release formulations, such as Aventis' Nicobid, Upsher-Smith's Niacor, Aventis' Nicolar, and Sanwakagaku's Perycit. Niacin extended release formulations include, e.g., Kos Pharmaceuticals' Niaspan and Upsher-Smith's SIo-Niacin. Exemplary antiplatelet agents include, e.g., aspirin (e.g., Bayer's aspirin), clopidogrel (Sanofi-Synthelabo/Bristol-Myers Squibb's Plavix), and ticlopidine (e.g., Sanofi-Synthelabo's Ticlid and Daiichi's Panaldine). Other aspirin-like compounds useful in combination with a dsRNA targeting PCSK9 include, e.g., Asacard (slow-release aspirin, by Pharmacia) and Pamicogrel (Kanebo/Angelini Ricerche/CEPA). Exemplary angiotensin-converting enzyme inhibitors include, e.g., ramipril (e.g., Aventis' Altace) and enalapril (e.g., Merck & Co.'s Vasotec). Exemplary acyl CoA cholesterol acetyltransferase (ACAT) inhibitors include, e.g., avasimibe (Pfizer), eflucimibe (BioM\acute{ε}rieux Pierre Fabre/Eli Lilly), CS-505 (Sankyo and Kyoto), and SMP-797 (Sumito). Exemplary cholesterol absorption inhibitors include, e.g., ezetimibe (Merck/Schering-Plough Pharmaceuticals Zetia®) and Pamaqueside (Pfizer). Exemplary CETP inhibitors include, e.g., Torcetrapib (also called CP-529414, Pfizer), JTT-705 (Japan Tobacco), and CETi-I (Avant Immunotherapeutics). Exemplary microsomal triglyceride transfer protein (MTTP) inhibitors include, e.g., implitapide (Bayer), R-103757 (Janssen), and CP-346086 (Pfizer). Other exemplary cholesterol modulators include, e.g., NO-1886 (Otsuka/TAP Pharmaceutical), CI-1027 (Pfizer), and WAY-135433 (Wyeth-Ayerst). Exemplary bile acid modulators include, e.g., HBS-107 (Hisamitsu/Banyu), Btg-511 (British Technology Group), BARI-1453 (Aventis), S-8921 (Shionogi), SD-5613 (Pfizer), and AZD-7806 (AstraZeneca). Exemplary peroxisome proliferation activated receptor (PPAR) agonists include, e.g., tesaglitazar (AZ-242) (AstraZeneca), Netoglitazone (MCC-555) (Mitsubishi/Johnson & Johnson), GW-409544 (Ligand Pharmaceuticals/GlaxoSmithKline), GW-501516 (Ligand Pharmaceuticals/GlaxoSmithKline), LY-929 (Ligand Pharmaceuticals and Eli Lilly), LY-465608 (Ligand Pharmaceuticals and Eli Lilly), LY-518674 (Ligand Pharmaceuticals and Eli Lilly), and MK-767 (Merck and Kyorin). Exemplary gene-based therapies include, e.g., AdGWEGF121.10 (GenVec), ApoAl (UCB Pharma/Groupe Fournier), EG-004 (Trinam) (Ark Therapeutics), and ATP-binding cassette transporter-Al (ABCAl) (CV Therapeutics/Incyte, Aventis, Xenon). Exemplary Glycoprotein Ilb/IIIa inhibitors include, e.g., roxifiban (also called DMP754, Bristol-Myers Squibb), Gantofiban (Merck KGaA/Yamanouchi), and Cromafiban (Millennium Pharmaceuticals). Exemplary squalene synthase inhibitors include, e.g., BMS-1884941 (Bristol-Myers Squibb), CP-210172 (Pfizer), CP-295697 (Pfizer), CP-294838 (Pfizer), and TAK-475 (Takeda). An exemplary MCP-I inhibitor is, e.g., RS-504393 (Roche Bioscience). The anti-atherosclerotic agent BO-653 (Chugai Pharmaceuticals), and the nicotinic acid derivative Nyclin (Yamanouchi Pharmacuticals) are also appropriate for administering in combination with a dsRNA featured in the invention. Exemplary combination therapies suitable for administration with a dsRNA targeting PCSK9 include, e.g., advicor (Niacin/lovastatin from Kos Pharmaceuticals), amlodipine/atorvastatin (Pfizer), and ezetimibe/simvastatin (e.g., Vytorin® 10/10, 10/20, 10/40, and 10/80 tablets by Merck/Schering-Plough Pharmaceuticals). Agents for treating hypercholesterolemia, and suitable for administration in combination with a dsRNA targeting PCSK9 include, e.g., lovastatin, niacin Altoprev® Extended-Release Tablets (Andrx Labs), lovastatin Caduet® Tablets (Pfizer), amlodipine besylate, atorvastatin calcium Crestor® Tablets (AstraZeneca), rosuvastatin calcium Lescol® Capsules (Novartis), fluvastatin sodium Lescol® (Reliant, Novartis), fluvastatin sodium Lipitor® Tablets (Parke-Davis), atorvastatin calcium Lofibra® Capsules (Gate), Niaspan Extended-Release Tablets (Kos), niacin Pravachol Tablets (Bristol-Myers Squibb), pravastatin sodium TriCor® Tablets (Abbott), fenofibrate Vytorin® 10/10 Tablets (Merck/Schering-Plough Pharmaceuticals), ezetimibe, simvastatin WelChol™ Tablets (Sankyo), colesevelam hydrochloride Zetia® Tablets (Schering), ezetimibe Zetia® Tablets (Merck/Schering-Plough Pharmaceuticals), and ezetimibe Zocor® Tablets (Merck).

[0295] In one embodiment, a siRNA is administered in combination with an ezetimibe/simvastatin combination (e.g., Vytorin® (Merck/Schering-Plough Pharmaceuticals)).

[0296] In one embodiment, the siRNA is administered to the patient, and then the additional therapeutic agent is administered to the patient (or vice versa). In another embodiment, the siRNA and the additional therapeutic agent are administered at the same time.

[0297] In another aspect, the invention features, a method of instructing an end user, e.g., a caregiver or a subject, on how to administer a siRNA described herein. The method includes, optionally, providing the end user with one or more doses of the siRNA, and instructing the end user to administer the siRNA on a regimen described herein, thereby instructing the end user.

[0298] Identification of Patients

[0299] In one aspect, the invention provides a method of treating a patient by selecting a patient on the basis that the patient is in need of LDL lowering, LDL lowering without lowering of HDL, ApoB lowering, or total cholesterol lowering. The method includes administering to the patient a siRNA in an amount sufficient to lower the patient's LDL levels or ApoB levels, e.g., without substantially lowering HDL levels.

[0300] Genetic predisposition plays a role in the development of target gene associated diseases, e.g., hyperlipidemia. Therefore, a patient in need of a siRNA can be identified by taking a family history, or, for example, screening for one or more genetic markers or variants. Examples of genes involved in hyperlipidemia include but are not limited to, e.g., LDL receptor (LDLR), the apoliproteins (ApoAl, ApoB, ApoE, and the like), Cholesteryl ester transfer protein (CETP), Lipoprotein lipase (LPL), hepatic lipase (LIPC), Endothelial lipase (EL), Lecithin:cholesteryl acyltransferase (LCAT).

[0301] A healthcare provider, such as a doctor, nurse, or family member, can take a family history before prescribing or administering a siRNA. In addition, a test may be performed to determine a geneotype or phenotype. For example, a DNA test may be performed on a sample from the patient, e.g., a blood sample, to identify the PCSK9 genotype and/or phenotype before a PCSK9 dsRNA is administered to the patient. In another embodiment, a test is performed to identify a related genotype and/or phenotype, e.g., a LDLR genotype. Example of genetic variants with the LDLR gene can be found in the art, e.g., in the following publications which are incorporated by reference: Costanza et al (2005) Relative contributions of genes, environment, and interactions to blood lipid concentrations in a general adult population. Am J. Epidemiol. 15; 161(8):714-24; Yamada et al. (2008) Genetic risk for metabolic syndrome: examination of candidate gene polymorphisms related to lipid metabolism in Japanese people. J Med. Genet. January; 45(1):22-8, Epub 2007 August 31; and Boes et al (2009) Genetic-epidemiological evidence on genes associated with HDL cholesterol levels: A systematic in-depth review. Exp. Gerontol 44:136-160, Epub 2008 Nov. 17.

[0302] Unless otherwise defined, all technical and scientific terms used herein have the same meaning as commonly understood by one of ordinary skill in the art to which this invention belongs. Although methods and materials similar or equivalent to those described herein can be used in the practice or testing of the iRNAs and methods featured in the invention, suitable methods and materials are described below. All publications, patent applications, patents, and other references mentioned herein are incorporated by reference in their entirety. In case of conflict, the present specification, including definitions, will control. In addition, the materials, methods, and examples are illustrative only and not intended to be limiting.

### EXAMPLES

### Example 1

### iRNA Synthesis

[0303] Source of Reagents

[0304] Where the source of a reagent is not specifically given herein, such reagent may be obtained from any supplier of reagents for molecular biology at a quality/purity standard for application in molecular biology.

[0305] Oligonucleotide Synthesis.

[0306] All oligonucleotides are synthesized on an AKTAoligopilot synthesizer. Commercially available controlled pore glass solid support (dT-CPG, 500 Å, Prime Synthesis) and RNA phosphoramidites with standard protecting groups, 5′-O-dimethoxytrityl N6-benzoyl-2′-t-butyldimethylsilyl-adenosine-3′-O—N,N′-diisopropyl-2-cyanoethylphosphoramidite, 5′-O-dimethoxytrityl-N4-acetyl-2′-t-butyldimethylsilyl-cytidine-3′-O—N,N′-diisopropyl-2-cyanoethylphosphoramidite, 5′-O-dimethoxytrityl-N2-isobutryl-2′-t-butyldimethylsilyl-guanosine-3′-O—N,N′-diisopropyl-2-cyanoethylphosphoramidite, and 5′-O-dimethoxytrityl-2′-t-butyldimethylsilyl-uridine-3′-O—N,N′-diisopropyl-2-cyanoethylphosphoramidite (Pierce Nucleic Acids Technologies) were used for the oligonucleotide synthesis. The 2′-F phosphoramidites, 5′-O-dimethoxytrityl-N4-acetyl-2′-fluoro-cytidine-3′-O—N,N′-diisopropyl-2-cyanoethyl-phosphoramidite and 5′-O-dimethoxytrityl-2′-fluoro-uridine-3′-O—N,N′-diisopropyl-2-cyanoethyl-phosphoramidite are purchased from (Promega). All phosphoramidites are used at a concentration of 0.2M in acetonitrile (CH₃CN) except for guanosine which is used at 0.2M concentration in 10% THF/ANC (v/v). Coupling/recycling time of 16 minutes is used. The activator is 5-ethyl thiotetrazole (0.75M, American International Chemicals); for the PO-oxidation iodine/water/pyridine is used and for the PS-oxidation PADS (2%) in 2,6-lutidine/ACN (1:1 v/v) is used.

[0307] 3′-ligand conjugated strands are synthesized using solid support containing the corresponding ligand. For example, the introduction of cholesterol unit in the sequence is performed from a hydroxyprolinol-cholesterol phosphoramidite. Cholesterol is tethered to trans-4-hydroxyprolinol via a 6-aminohexanoate linkage to obtain a hydroxyprolinol-cholesterol moiety. 5′-end Cy-3 and Cy-5.5 (fluorophore) labeled iRNAs are synthesized from the corresponding Quasar-570 (Cy-3) phosphoramidite are purchased from Biosearch Technologies. Conjugation of ligands to 5′-end and or internal position is achieved by using appropriately protected ligand-phosphoramidite building block. An extended 15 min coupling of 0.1 M solution of phosphoramidite in anhydrous CH₃CN in the presence of 5-(ethylthio)-1H-tetrazole activator to a solid-support-bound oligonucleotide. Oxidation of the internucleotide phosphite to the phosphate is carried out using standard iodine-water as reported (1) or by treatment with tert-butyl hydroperoxide/acetonitrile/water (10:87:3) with 10 min oxidation wait time conjugated oligonucleotide. Phosphorothioate is introduced by the oxidation of phosphite to phosphorothioate by using a sulfur transfer reagent such as DDTT (purchased from AM Chemicals), PADS and or Beaucage reagent. The cholesterol phosphoramidite is synthesized in house and used at a concentration of 0.1 M in dichloromethane. Coupling time for the cholesterol phosphoramidite is 16 minutes.

[0308] Deprotection I (Nucleobase Deprotection)

[0309] After completion of synthesis, the support is transferred to a 100 mL glass bottle (VWR). The oligonucleotide is cleaved from the support with simultaneous deprotection of base and phosphate groups with 80 mL of a mixture of ethanolic ammonia [ammonia:ethanol (3:1)] for 6.5 h at 55° C. The bottle is cooled briefly on ice and then the ethanolic ammonia mixture is filtered into a new 250-mL bottle. The CPG is washed with 2×40 mL portions of ethanol/water (1:1 v/v). The volume of the mixture is then reduced to ˜30 mL by roto-vap. The mixture is then frozen on dry ice and dried under vacuum on a speed vac.

[0310] Deprotection II (Removal of 2′-TBDMS Group)

[0311] The dried residue is resuspended in 26 mL of triethylamine, triethylamine trihydrofluoride (TEA.3HF) or pyridine-HF and DMSO (3:4:6) and heated at 60° C. for 90 minutes to remove the tert-butyldimethylsilyl (TBDMS) groups at the 2′ position. The reaction is then quenched with 50 mL of 20 mM sodium acetate and the pH is adjusted to 6.5. Oligonucleotide is stored in a freezer until purification.

[0312] Analysis

[0313] The oligonucleotides are analyzed by high-performance liquid chromatography (HPLC) prior to purification and selection of buffer and column depends on nature of the sequence and or conjugated ligand.

[0314] HPLC Purification

[0315] The ligand-conjugated oligonucleotides are purified by reverse-phase preparative HPLC. The unconjugated oligonucleotides are purified by anion-exchange HPLC on a TSK gel column packed in house. The buffers are 20 mM sodium phosphate (pH 8.5) in 10% CH₃CN (buffer A) and 20 mM sodium phosphate (pH 8.5) in 10% CH₃CN, 1M NaBr (buffer B). Fractions containing full-length oligonucleotides are pooled, desalted, and lyophilized. Approximately 0.15 OD of desalted oligonucleotidess are diluted in water to 150 μL and then pipetted into special vials for CGE and LC/MS analysis. Compounds are then analyzed by LC-ESMS and CGE.

[0316] iRNA Preparation

[0317] For the general preparation of iRNA, equimolar amounts of sense and antisense strand are heated in 1×PBS at 95° C. for 5 min and slowly cooled to room temperature. Integrity of the duplex is confirmed by HPLC analysis.

[0318] Nucleic acid sequences are represented below using standard nomenclature, and specifically the abbreviations of Table B.

TABLE B
Abbreviations of nucleotide monomers used in nucleic acid sequence
representation. It will be understood that these monomers, when
present in an oligonucleotide, are mutually linked by
5′-3′-phosphodiester bonds.

| Abbreviation | Nucleotide(s) |
|---|---|
| A | adenosine |
| C | cytidine |
| G | guanosine |
| U | uridine |
| N | any nucleotide (G, A, C, T or U) |
| a | 2′-O-methyladenosine |
| c | 2′-O-methylcytidine |
| g | 2′-O-methylguanosine |
| u | 2′-O-methyluridine |
| dT, T | 2′-deoxythymidine |
| s | phosphorothioate linkage |

### Example 2

### PCSK9 siRNA Design, Synthesis, and Screening

[0319] A description of the design, synthesis, and assays using PCSK9 siRNA can be found in detail in U.S. patent application Ser. No. 11/746,864 filed on May 10, 2007 (now U.S. Pat. No. 7,605,251) and International Patent Application No. PCT/US2007/068655 filed May 10, 2007 (published as WO 2007/134161) and in U.S. patent application Ser. No. 12/478,452 filed Jun. 4, 2009 (published as US 2010/0010066) and International Patent Application No. PCT/US2009/032743 filed Jan. 30, 2009 (published as WO 2009/134487). All are incorporated by reference in their entirety for all purposes.

[0320] siRNA design was carried out to identify siRNAs targeting the proprotein convertase subtilisin/kexin type 9 gene (human symbol PCSK9) from human and cynomolgous monkey (Macaca fascicularis; henceforth “cyno”). The design used the PCSK9 transcript NM 174936.2 (human) from the NCBI RefSeq collection, and a cyno PCSK9 transcript obtained as part of Alnylam's cyno transcriptome-sequencing effort. A rhesus monkey (Macaca mulatta) transcript from RefSeq, NM_{—}001112660.1, was also utilized in PCSK9 transcript regions where cyno data was lacking (see below).

[0321] siRNA Design and Specificity Prediction

[0322] Three sets of PCSK9 duplexes were designed: 1) Duplexes with 100% identity between human and NHP PCSK9 (cyno where available, rhesus otherwise), 2) Duplexes with 100% identity to human PCSK9 that allowed mismatches at antisense positions 1, 18, or 19 to NHP PCSK9, and 3) Duplexes containing mismatches and/or deletions relative to human PCSK9. The sizes, contents, and design criteria of each duplex set were as follows:
[0323] 1. Human/NHP duplexes with perfect matches between human and cyno PCSK9 (spanning positions 695-2916 of human PCSK9 NM_{—}174936.2) and human and rhesus PCSK9 (spanning positions 1-695/2916-3561.) All had GC content of 25-65%; none had G or C at both antisense positions 1 and 2; none had runs of repeated nucleotides longer than 4. Sequences are listed in Table 1.
[0324] 2. Human/NHP duplexes with mismatches at antisense positions 1, 18, and 19. These duplexes are perfect matches to human PCKS9, but allow mismatches to NHP PCSK9 at any of the antisense positions 1, 18, or 19. Cyno and/or rhesus PCSK9 transcripts were used as for set 1 above: All had GC content of 25-65%; none had G or C at antisense position 1; none had runs of repeated nucleotides longer than 5. Sequences are listed in Table 1.
[0325] 3. Human PCSK9 duplexes with designed mismatches (9 duplexes, see Table 6) and/or deletions (12 duplexes, see Table 7). These duplexes are variants of AD-9680.

[0326] The predicted specificity of candidate duplexes was predicted from each sequence using an algorithm that searched, parsed alignments, generated off-target and mis-matched scores, calculated frequencies, and assigned each siRNA sequence to a specificity category.

[0327] Synthesis of PCSK9 Sequences

[0328] PCSK9 sequences were synthesized on MerMade 192 synthesizer at 1 umol scale.

[0329] The human-NHP cross reactive sequences described above and in Table 1 were synthesized using the a modification chemistry. Table 2 includes the modified versions of the sense and antisense strands. Details of this chemistry are as follows:
[0330] All pyrimidines (cytosine and uridine) in the sense strand were replaced with corresponding 2′-O-Methyl bases (2′ O-Methyl C and 2′-O-Methyl U)
[0331] In the antisense strand, pyrimidines (C and U) adjacent to (towards 5′ position) ribo A nucleoside were replaced with their corresponding 2-O-Methyl nucleosides
[0332] A two base dTdT extension at 3′ end of both sense and anti sense sequences was introduced. This two base overhang has a phosphorothioate linkage

[0333] For the synthesis of human only PCSK9 sequences, different chemical modifications and structural features have been introduced into the parent single strand sequences, A-14664 and A-14665 (Parent duplex AD-9680). See Tables 6 and 7.

[0334] The structure features include introductions of mismatches and or deletions at different sites in the single strand, interchanging sites of 2′OMe chemical modifications, replacing 3′dTdT overhang with 3′uu overhang and introducing an universal base, 2,4 difluoro toluene (2,4 DFT) at position 10 in the sense strand. Synthesis of individual sequences was performed in a high throughput parallel synthesis format at 1 umol scale in 96well plates. Synthesis process was based on solid supported oligonucleotide method using phosphoramidite chemistry. Individual amidite solutions were prepared at 0.1M ((in Acetonitrile) and ethyl thio tetrazole (0.6M in Acetonitrile) was used as activator.

[0335] Cleavage and Deprotection:

[0336] The synthesized sequences were cleaved and deprotected in 96 well plates, using methylamine in the first step and triethylamine.3HF in the second step. The crude sequences were precipitated using acetone: ethanol mix and the pellet were re-suspended in 0.02M sodium acetate buffer. Samples from each sequence were analyzed by LC-MS and the resulting mass data confirmed the identity of the sequences. A selected set of samples were also analyzed by IEX chromatography.

[0337] Purification:

[0338] The crude PCSK9 single strands were split into two equal halves and one portion was purified by ion exchange chromatography. An AKTA Explorer purification system using Source 15Q column was used for this process. Purification was performed using a column and in-line buffer heater set at 60 C. A single peak corresponding to the full length sequence was collected in the eluent. The purified single strands were analyzed for purity by ion exchange chromatography.

[0339] The purified sequences were desalted on a Sephadex G25 column using AKTA Purifier. The desalted PCK9 sequences were analyzed for concentration and purity. The single strands were then submitted for annealing. Equimolar amounts of sense and antisense single strands were combined and annealed using Tecan liquid handling robot. Individual duplexes were tested by CGE (capillary gel electrophoresis) for testing their purity. All duplexes were released for screening assays.

### Example 3

### In Vitro Screening of PCSK9 siRNAs

[0340] Cell Culture and Transfection:

[0341] Hela cells (ATCC, Manassas, Va.) were grown to near confluence at 37° C. in an atmosphere of 5% CO₂ in Eagle's Minimum Essential Medium (EMEM, ATCC) supplemented with 10% FBS, streptomycin, and glutamine (ATCC) before being released from the plate by trypsinization. Reverse transfection was carried out by adding 5 μl of Opti-MEM to 5 μl of siRNA duplexes per well into a 96-well plate along with 10 μl of Opti-MEM plus 0.2 μl of Lipofectamine RNAiMax per well (Invitrogen, Carlsbad Calif. cat #13778-150) and incubated at room temperature for 15 minutes. 80 μl of complete growth media without antibiotic containing 2.0×10⁴ Hela cells were then added. In some cases cells were first added to the wells and 4-5 hours later transfection reagents described above were added. Cells were incubated for 24 hours prior to RNA purification. Experiments were performed at 0.1 or 10 nM final duplex concentration. For dose response screens, HeLa cells were trasfected with siRNAs over a range of doses.

[0342] Total RNA isolation using MagMAX-96 Total RNA Isolation Kit (Applied Biosystem, Forer City Calif., part #: AM1830):

[0343] Cells were harvested and lysed in 140 μl of Lysis/Binding Solution then mixed for 1 minute at 850 rpm using and Eppendorf Thermomixer (the mixing speed was the same throughout the process). Twenty micro liters of magnetic beads and Lysis/Binding Enhancer mixture were added into cell-lysate and mixed for 5 minutes. Magnetic beads were captured using magnetic stand and the supernatant was removed without disturbing the beads. After removing supernatant, magnetic beads were washed with Wash Solution 1 (isopropanol added) and mixed for 1 minute. Beads were capture again and supernatant removed. Beads were then washed with 150 μl Wash Solution 2 (Ethanol added), captured and supernatant was removed. 50 μl of DNase mixture (MagMax turbo DNase Buffer and Turbo DNase) was then added to the beads and they were mixed for 10 to 15 minutes. After mixing, 100 μl of RNA Rebinding Solution was added and mixed for 3 minutes. Supernatant was removed and magnetic beads were washed again with 150 μl Wash Solution 2 and mixed for 1 minute and supernatant was removed completely. The magnetic beads were mixed for 2 minutes to dry before RNA was eluted with 50 μl of water.

[0344] cDNA Synthesis using ABI High Capacity cDNA Reverse Transcription Kit (Applied Biosystems, Foster City, Calif., Cat #4368813):

[0345] A master mix of 2 μl 10X Buffer, 0.8 μl 25X dNTPs, 2 μl Random primers, 1 μl Reverse Transcriptase, 1 μl RNase inhibitor and 3.2 μl of H2O per reaction were added into 10 μl total RNA. cDNA was generated using a Bio-Rad C-1000 or S-1000 thermal cycler (Hercules, Calif.) through the following steps: 25° C. 10 min, 37° C. 120 min, 85° C. 5 sec, 4° C. hold.

[0346] Real Time PCR:

[0347] 2 μl of cDNA were added to a master mix containing 1 μl GAPDH TaqMan Probe (Applied Biosystems Cat #4326317E), 1 μl PCSK9 TaqMan probe (Applied Biosystems cat #HS03037355_M1) and 10 μl Roche Probes Master Mix (Roche Cat #04887301001) per well in a LightCycler 480 384 well plate (Roche cat #0472974001). Real time PCR was done in a LightCycler 480 Real Time PCR machine (Roche). Each duplex was tested in two independent transfections and each transfections was assayed in duplicate.

[0348] Branched DNA Assays—QunatiGene 2.0 (Panomics cat #: QS0011): Used to Screen All Other Duplexes

[0349] After a 24 hour incubation at the dose or doses stated, media was removed and cells were lysed in 100 ul of Lysis Mixture (a mixture of 1 volume of lysis mixture, 2 volume of nuclease-free water and 10 ul of Proteinase-K/ml for a final concentration of 20 mg/ml.) then incubated at 65° C. for 35 minutes. 20 μl of Working Probe Set (TTR probe for gene target and GAPDH for endogenous control) and 80 ul of cell-lysate were then added into the Capture Plate. Capture Plates were incubated at 55° C.±1° C. (aprx. 16-20 hrs). The next day, the Capture Plate were washed 3 times with 1× Wash Buffer (nuclease-free water, Buffer Component 1 and Wash Buffer Component 2), then dried by centrifuging for 1 minute at 240 g. 100 μl of pre-Amplifer Working Reagent was added into the Capture Plate, which was sealed with aluminum foiled and incubated for 1 hour at 55° C.±1° C. Following a 1 hour incubation, the wash step was repeated then 100 μl of Amplifier Working Reagent was added. After 1 hour, the wash and dry steps were repeated, and 100 μl of Label Probe was added. Capture plates were incubated 50° C.±1° C. for 1 hour. The plate was then washed with 1× Wash Buffer, dried and 100 μl Substrate was added into the Capture Plate. Capture Plates were read using the SpectraMax Luminometer (Molecular Devices, Sunnyvale, Calif.) following a 5 to 15 minute incubation.

[0350] Data Analysis

[0351] bDNA data were analyzed by subtracting the average background from each triplicate sample, averaging the triplicate GAPDH (control probe) and PCSK9 (experimental probe) then taking the ratio: (experimental probe-background)/(control probe-background).

[0352] Real time data were analyzed using the ΔΔCt method. Each sample was normalized to GAPDH expression and knockdown was assessed relative to cells transfected with the non-targeting duplex AD-1955.

[0353] IC50s were defined using a 4 parameter fit model in XLfit.

[0354] Results

[0355] The 1072 endolight chemically modified PCSK9 siRNAs described in Table 2 were used in 0.1 nM and 10 nM single dose experiments. The results are shown in Table 3.

[0356] The top 45 performing duplexes were used in dose response assays as described above. Table 4 provides the results of dose response experiments. Four of the tested siRNAs exhibited IC₅₀ in the range of lead AD-9680.

[0357] Table 5 provides the results of 0.1 nM knockdown of PCSK9 lead optimization siRNAs.

[0358] Duplexes based on lead AD-9680 but with different modifications were used in dose response assays. The results are presented in Table 6.

[0359] Duplexes based on lead AD-9680 but with deletions in the antisense strand were used in dose response assays. The results are presented in Table 7.

### Example 4

### Silencing of PCSK9 in LDLR −/+ Transgenic Mice

[0360] There is a large unmet need for treatment of hypercholesterolemia in patients that are heterozygous for the LDLR gene. These individuals have one mutant and one wt copy of LDLR and as a result, have significantly elevated LDLc levels and higher incidence/risk of cardiovascular events. Silencing of PCSK9 using siRNA in LDLR heterozygous mice and the effect on their total cholesterol was investigate.

[0361] Lipid formulated PCSK9 siRNA was administered to wild-type and LDLR-heterozygous mice at 0.1, 0.3, 1.0, and 3.0 mg/kg. After 3 days, the mice were sacragfive and liver PCSK9 mRNA levels and serum total cholesterol levels were determined.

[0362] The Jackson Laboratory mated a JAX strain, B6.129S7-Ldlrtm1Her/J (stock#002207) to a C57BL/6J mouse (stock#000664) and provided female LDLR heterozygous knockout mice. Bolus dosing of siRNA in the LDLR heterozygous mice (5/group, 18-20 g body weight) was performed by low volume tail vein injection using a 27 G needle. Mice were dosed with 3.0, 1.0, 0.3 and 0.1 mg/kg of siRNA targeting PCSK9 (AF-011-10792) and a control luciferase targeting siRNA (AF-011-1955) at 3 mg/kg. The siRNA were lipid formulated as described herein.

[0363] Animals were kept under an infrared lamp for approximately 3 min prior to dosing to ease injection. 72 hour post dose animals were sacrificed by CO₂-asphyxiation. 0.2 ml blood was collected by retro-orbital bleeding and stored at −80° C. until analysis. Liver was harvested and frozen in liquid nitrogen. Frozen livers were grinded using 6850 Freezer/Mill Cryogenic Grinder (SPEX CentriPrep, Inc) and powders stored at −80° C. until analysis.

[0364] Total serum cholesterol in mouse serum was measured using the Wako Cholesterol E enzymatic colorimetric method (Wako Chemicals USA, Inc., Richmond, Va., USA) according to manufacturer's instructions. Measurements were taken on a VERSA Max Tunable microplate reader (Molecular Devices, Sunnyvale, Calif.) using SoftMax Pro software.

[0365] PCSK9 mRNA levels were detected using the branched-DNA technology based QuantiGene Reagent System (Panomics, Fremont, Calif., USA) according to the protocol. 10-20 mg of frozen liver powders was lysed in 600 μl of 0.3 μg/ml Proteinase K (Epicentre, #MPRK092) in Tissue and Cell Lysis Solution (Epicentre, #MTC096H) at 65° C. for 1 hour. Then 10 μl of the lysates were added to 90 ul of Lysis Working Reagent (1 volume of stock Lysis Mixture in two volumes of water) and incubated at 55° C. overnight on Panomics capture plates with probe sets specific to mouse PCSK9 and mouse control sequence GAPDH (Panomics, USA). Capture plates then were processed for signal amplification and detection according to the protocol and chemiluminescence was read as relative light units (RLUs) on a microplate luminometer Victor2-Light (Perkin Elmer). The ratio of PCSK9 mRNA to GAPDH mRNA in liver lysates was averaged over each treatment group and compared to a control group treated with PBS.

[0366] The results are shown in FIG. 1. Treatment of LDLR heterozygous mice with AF-011-10792 siRNA, but not with unrelated siRNA control AF-011-1955 resulted in significant and dose dependent (60%) lowering of PCSK9 transcript levels in mouse liver (as indicated by a smaller PCSK9 to GAPDH transcript ratio when normalized to a PBS control group), indicating that AF-011 formulated siRNA molecule was active in vivo. As shown in FIG. 1, the silencing activity translated to lowering of total cholesterol by 20-30% in those animals. PCSK9 silencing in LDLR heterozygous knockout mice results in lowering of total serum cholesterol, indicating that a single wt copy of LDLR is sufficient for the PCSK9 mechanism to be effective.

### Example 5

### Reduction of Total Serum Cholesterol with PCSK9 Targeting siRNA in Humans

[0367] A human subject is treated with a pharmaceutical composition, e.g., a nucleic acid-lipid particle having a siRNA.

[0368] At time zero, a suitable first dose of the pharmaceutical composition is subcutaneously administered to the subject. The composition is formulated as described herein. After a period of time, the subject's condition is evaluated, e.g., by measurement of total serum cholesterol. This measurement can be accompanied by a measurement of PCSK9 expression in said subject, and/or the products of the successful siRNA-targeting of PCSK9 mRNA. Other relevant criteria can also be measured. The number and strength of doses are adjusted according to the subject's needs.

[0369] In some embodiments, the subject is heterozygous for a LDLR mutation or polymorphism.

[0370] After treatment, the subject's condition is compared to the condition existing prior to the treatment, or relative to the condition of a similarly afflicted but untreated subject.

[0371] Those skilled in the art are familiar with methods and compositions in addition to those specifically set out in the present disclosure which will allow them to practice this invention to the full scope of the claims hereinafter appended.

TABLE 1
Chemically unmodified PCSK9 siRNAs (1072 duplexes, AD-27043-28122)

| | Sense strand | SEQ | Antisense strand | SEQ | Position | Position | Position |
|---|---|---|---|---|---|---|---|
| Duplex name | sequence 5′ to 3′ | ID NO | sequence 5′ to 3′ | ID NO | human | cyno | rhesus |
| AD-27043.1 | ACUACAUCGAGGAGGACUC | 1 | GAGUCCUCCUCGAUGUAGU | 611 | 713 | 518 | NA |
| AD-27044.1 | UACAUCGAGGAGGACUCCU | 2 | AGGAGUCCUCCUCGAUGUA | 612 | 715 | 520 | NA |
| AD-27045.1 | ACAUCGAGGAGGACUCCUC | 3 | GAGGAGUCCUCCUCGAUGU | 613 | 716 | 521 | NA |
| AD-27046.1 | CAUCGAGGAGGACUCCUCU | 4 | AGAGGAGUCCUCCUCGAUG | 614 | 717 | 522 | NA |
| AD-27047.1 | UCGAGGAGGACUCCUCUGU | 5 | ACAGAGGAGUCCUCCUCGA | 615 | 719 | 524 | NA |
| AD-27048.1 | CGAGGAGGACUCCUCUGUC | 6 | GACAGAGGAGUCCUCCUCG | 616 | 720 | 525 | NA |
| AD-27049.1 | GAGGAGGACUCCUCUGUCU | 7 | AGACAGAGGAGUCCUCCUC | 617 | 721 | 526 | NA |
| AD-27050.1 | AGGAGGACUCCUCUGUCUU | 8 | AAGACAGAGGAGUCCUCCU | 618 | 722 | 527 | NA |
| AD-27051.1 | GCAGCCUGGUGGAGGUGUA | 9 | UACACCUCCACCAGGCUGC | 619 | 821 | 626 | NA |
| AD-27052.1 | CAGCCUGGUGGAGGUGUAU | 10 | AUACACCUCCACCAGGCUG | 620 | 822 | 627 | NA |
| AD-27053.1 | AGCCUGGUGGAGGUGUAUC | 11 | GAUACACCUCCACCAGGCU | 621 | 823 | 628 | NA |
| AD-27054.1 | GCCUGGUGGAGGUGUAUCU | 12 | AGAUACACCUCCACCAGGC | 622 | 824 | 629 | NA |
| AD-27055.1 | GUGGAGGUGUAUCUCCUAG | 13 | CUAGGAGAUACACCUCCAC | 623 | 829 | 634 | NA |
| AD-27056.1 | UGGAGGUGUAUCUCCUAGA | 14 | UCUAGGAGAUACACCUCCA | 624 | 830 | 635 | NA |
| AD-27057.1 | GAGGUGUAUCUCCUAGACA | 15 | UGUCUAGGAGAUACACCUC | 625 | 832 | 637 | NA |
| AD-27058.1 | GUGUAUCUCCUAGACACCA | 16 | UGGUGUCUAGGAGAUACAC | 626 | 835 | 640 | NA |
| AD-27059.1 | UAUCUCCUAGACACCAGCA | 17 | UGCUGGUGUCUAGGAGAUA | 627 | 838 | 643 | NA |
| AD-27060.1 | AUCUCCUAGACACCAGCAU | 18 | AUGCUGGUGUCUAGGAGAU | 628 | 839 | 644 | NA |
| AD-27061.1 | CUAGACACCAGCAUACAGA | 19 | UCUGUAUGCUGGUGUCUAG | 629 | 844 | 649 | NA |
| AD-27062.1 | UAGACACCAGCAUACAGAG | 20 | CUCUGUAUGCUGGUGUCUA | 630 | 845 | 650 | NA |
| AD-27063.1 | AGACACCAGCAUACAGAGU | 21 | ACUCUGUAUGCUGGUGUCU | 631 | 846 | 651 | NA |
| AD-27064.1 | ACACCAGCAUACAGAGUGA | 22 | UCACUCUGUAUGCUGGUGU | 632 | 848 | 653 | NA |
| AD-27065.1 | CACCAGCAUACAGAGUGAC | 23 | GUCACUCUGUAUGCUGGUG | 633 | 849 | 654 | NA |
| AD-27066.1 | CCAGCAUACAGAGUGACCA | 24 | UGGUCACUCUGUAUGCUGG | 634 | 851 | 656 | NA |
| AD-27067.1 | CAGCAUACAGAGUGACCAC | 25 | GUGGUCACUCUGUAUGCUG | 635 | 852 | 657 | NA |
| AD-27068.1 | UACAGAGUGACCACCGGGA | 26 | UCCCGGUGGUCACUCUGUA | 636 | 857 | 662 | NA |
| AD-27069.1 | ACAGAGUGACCACCGGGAA | 27 | UUCCCGGUGGUCACUCUGU | 637 | 858 | 663 | NA |
| AD-27070.1 | CAGAGUGACCACCGGGAAA | 28 | UUUCCCGGUGGUCACUCUG | 638 | 859 | 664 | NA |
| AD-27071.1 | UGACCACCGGGAAAUCGAG | 29 | CUCGAUUUCCCGGUGGUCA | 639 | 864 | 669 | NA |
| AD-27072.1 | CACCGGGAAAUCGAGGGCA | 30 | UGCCCUCGAUUUCCCGGUG | 640 | 868 | 673 | NA |
| AD-27073.1 | ACCGGGAAAUCGAGGGCAG | 31 | CUGCCCUCGAUUUCCCGGU | 641 | 869 | 674 | NA |
| AD-27074.1 | GGGAAAUCGAGGGCAGGGU | 32 | ACCCUGCCCUCGAUUUCCC | 642 | 872 | 677 | NA |
| AD-27075.1 | GGAAAUCGAGGGCAGGGUC | 33 | GACCCUGCCCUCGAUUUCC | 643 | 873 | 678 | NA |
| AD-27076.1 | GAAAUCGAGGGCAGGGUCA | 34 | UGACCCUGCCCUCGAUUUC | 644 | 874 | 679 | NA |
| AD-27077.1 | AAUCGAGGGCAGGGUCAUG | 35 | CAUGACCCUGCCCUCGAUU | 645 | 876 | 681 | NA |
| AD-27078.1 | UCGAGGGCAGGGUCAUGGU | 36 | ACCAUGACCCUGCCCUCGA | 646 | 878 | 683 | NA |
| AD-27079.1 | AGGGCAGGGUCAUGGUCAC | 37 | GUGACCAUGACCCUGCCCU | 647 | 881 | 686 | NA |
| AD-27080.1 | GCAGGGUCAUGGUCACCGA | 38 | UCGGUGACCAUGACCCUGC | 648 | 884 | 689 | NA |
| AD-27081.1 | GGGUCAUGGUCACCGACUU | 39 | AAGUCGGUGACCAUGACCC | 649 | 887 | 692 | NA |
| AD-27082.1 | GGUCAUGGUCACCGACUUC | 40 | GAAGUCGGUGACCAUGACC | 650 | 888 | 693 | NA |
| AD-27083.1 | UCAUGGUCACCGACUUCGA | 41 | UCGAAGUCGGUGACCAUGA | 651 | 890 | 695 | NA |
| AD-27084.1 | CAUGGUCACCGACUUCGAG | 42 | CUCGAAGUCGGUGACCAUG | 652 | 891 | 696 | NA |
| AD-27085.1 | GGACCCGCUUCCACAGACA | 43 | UGUCUGUGGAAGCGGGUCC | 653 | 929 | 734 | NA |
| AD-27086.1 | GACCCGCUUCCACAGACAG | 44 | CUGUCUGUGGAAGCGGGUC | 654 | 930 | 735 | NA |
| AD-27087.1 | CGCUUCCACAGACAGGCCA | 45 | UGGCCUGUCUGUGGAAGCG | 655 | 934 | 739 | NA |
| AD-27088.1 | GCUUCCACAGACAGGCCAG | 46 | CUGGCCUGUCUGUGGAAGC | 656 | 935 | 740 | NA |
| AD-27089.1 | UUCCACAGACAGGCCAGCA | 47 | UGCUGGCCUGUCUGUGGAA | 657 | 937 | 742 | NA |
| AD-27090.1 | UCCACAGACAGGCCAGCAA | 48 | UUGCUGGCCUGUCUGUGGA | 658 | 938 | 743 | NA |
| an 27091.1 | CCACAGACAGGCCAGCAAG | 49 | CUUGCUGGCCUGUCUGUGG | 659 | 939 | 744 | NA |
| AD-27092.1 | CACAGACAGGCCAGCAAGU | 50 | ACUUGCUGGCCUGUCUGUG | 660 | 940 | 745 | NA |
| AD-27093.1 | ACAGACAGGCCAGCAAGUG | 51 | CACUUGCUGGCCUGUCUGU | 661 | 941 | 746 | NA |
| AD-27094.1 | CAGACAGGCCAGCAAGUGU | 52 | ACACUUGCUGGCCUGUCUG | 662 | 942 | 747 | NA |
| AD-27095.1 | AGACAGGCCAGCAAGUGUG | 53 | CACACUUGCUGGCCUGUCU | 663 | 943 | 748 | NA |
| AD-27096.1 | GACAGGCCAGCAAGUGUGA | 54 | UCACACUUGCUGGCCUGUC | 664 | 944 | 749 | NA |
| AD-27097.1 | ACAGGCCAGCAAGUGUGAC | 55 | GUCACACUUGCUGGCCUGU | 665 | 945 | 750 | NA |
| AD-27098.1 | CAGGCCAGCAAGUGUGACA | 56 | UGUCACACUUGCUGGCCUG | 666 | 946 | 751 | NA |
| AD-27093.1 | AGGCCAGCAAGUGUGACAG | 57 | CUGUCACACUUGCUGGCCU | 667 | 947 | 752 | NA |
| AD-27100.1 | AGCCUGCGCGUGCUCAACU | 58 | AGUUGAGCACGCGCAGGCU | 668 | 1036 | 841 | NA |
| AD-27101.1 | GCGCGUGCUCAACUGCCAA | 59 | UUGGCAGUUGAGCACGCGC | 669 | 1041 | 846 | NA |
| AD-27102.1 | GUGCUCAACUGCCAAGGGA | 60 | UCCCUUGGCAGUUGAGCAC | 670 | 1045 | 850 | NA |
| AD-27103.1 | UGCUCAACUGCCAAGGGAA | 61 | UUCCCUUGGCAGUUGAGCA | 671 | 1046 | 851 | NA |
| AD-27104.1 | GCUCAACUGCCAAGGGAAG | 62 | CUUCCCUUGGCAGUUGAGC | 672 | 1047 | 852 | NA |
| AD-27105.1 | AACUGCCAAGGGAAGGGCA | 63 | UGCCCUUCCCUUGGCAGUU | 673 | 1051 | 856 | NA |
| AD-27106.1 | ACUGCCAAGGGAAGGGCAC | 64 | GUGCCCUUCCCUUGGCAGU | 674 | 1052 | 857 | NA |
| AD-27107.1 | CACCCUCAUAGGCCUGGAG | 65 | CUCCAGGCCUAUGAGGGUG | 675 | 1080 | 885 | 1213 |
| AD-27108.1 | ACCCUCAUAGGCCUGGAGU | 66 | ACUCCAGGCCUAUGAGGGU | 676 | 1081 | 886 | 1214 |
| AD-27109.1 | CCCUCAUAGGCCUGGAGUU | 67 | AACUCCAGGCCUAUGAGGG | 677 | 1082 | 887 | 1215 |
| AD-27110.1 | CCUCAUAGGCCUGGAGUUU | 68 | AAACUCCAGGCCUAUGAGG | 678 | 1083 | 888 | 1216 |
| AD-27111.1 | CUCAUAGGCCUGGAGUUUA | 69 | UAAACUCCAGGCCUAUGAG | 679 | 1084 | 889 | 1217 |
| AD-27112.1 | CCUGGAGUUUAUUCGGAAA | 70 | UUUCCGAAUAAACUCCAGG | 680 | 1092 | 897 | NA |
| AD-27113.1 | UGGAGUUUAUUCGGAAAAG | 71 | CUUUUCCGAAUAAACUCCA | 681 | 1094 | 899 | NA |
| AD-27114.1 | AGUUUAUUCGGAAAAGCCA | 72 | UGGCUUUUCCGAAUAAACU | 682 | 1097 | 902 | NA |
| AD-27115.1 | GUUUAUUCGGAAAAGCCAG | 73 | CUGGCUUUUCCGAAUAAAC | 683 | 1098 | 903 | NA |
| AD-27116.1 | UAUUCGGAAAAGCCAGCUG | 74 | CAGCUGGCUUUUCCGAAUA | 684 | 1101 | 906 | NA |
| AD-27117.1 | UUCGGAAAAGCCAGCUGGU | 75 | ACCAGCUGGCUUUUCCGAA | 685 | 1103 | 908 | NA |
| AD-27118.1 | UCGGAAAAGCCAGCUGGUC | 76 | GACCAGCUGGCUUUUCCGA | 686 | 1104 | 909 | NA |
| AD-27119.1 | GGAAAAGCCAGCUGGUCCA | 77 | UGGACCAGCUGGCUUUUCC | 687 | 1106 | 911 | NA |
| AD-27120.1 | GAAAAGCCAGCUGGUCCAG | 78 | CUGGACCAGCUGGCUUUUC | 688 | 1107 | 912 | NA |
| AD-27121.1 | UCACCGCUGCCGGCAACUU | 79 | AAGUUGCCGGCAGCGGUGA | 689 | 1226 | 1031 | NA |
| AD-27122.1 | AACUUCCGGGACGAUGCCU | 80 | AGGCAUCGUCCCGGAAGUU | 690 | 1240 | 1045 | NA |
| AD-27123.1 | ACUUCCGGGACGAUGCCUG | 81 | CAGGCAUCGUCCCGGAAGU | 691 | 1241 | 1046 | NA |
| AD-27124.1 | GGGACGAUGCCUGCCUCUA | 82 | UAGAGGCAGGCAUCGUCCC | 692 | 1247 | 1052 | NA |
| AD-27125.1 | GACGAUGCCUGCCUCUACU | 83 | AGUAGAGGCAGGCAUCGUC | 693 | 1249 | 1054 | NA |
| AD-27126.1 | ACGAUGCCUGCCUCUACUC | 84 | GAGUAGAGGCAGGCAUCGU | 694 | 1250 | 1055 | NA |
| AD-27127.1 | CCCGAGGUCAUCACAGUUG | 85 | CAACUGUGAUGACCUCGGG | 695 | 1282 | 1087 | NA |
| AD-27128.1 | GUCAUCACAGUUGGGGCCA | 86 | UGGCCCCAACUGUGAUGAC | 696 | 1288 | 1093 | NA |
| AD-27129.1 | UCAUCACAGUUGGGGCCAC | 87 | GUGGCCCCAACUGUGAUGA | 697 | 1289 | 1094 | NA |
| AD-27130.1 | AUCACAGUUGGGGCCACCA | 88 | UGGUGGCCCCAACUGUGAU | 698 | 1291 | 1096 | NA |
| AD-27131.1 | UCACAGUUGGGGCCACCAA | 89 | UUGGUGGCCCCAACUGUGA | 699 | 1292 | 1097 | NA |
| AD-27132.1 | CACAGUUGGGGCCACCAAU | 90 | AUUGGUGGCCCCAACUGUG | 700 | 1293 | 1098 | NA |
| AD-27133.1 | ACAGUUGGGGCCACCAAUG | 91 | CAUUGGUGGCCCCAACUGU | 701 | 1294 | 1099 | NA |
| AD-27134.1 | UUGGGGCCACCAAUGCCCA | 92 | UGGGCAUUGGUGGCCCCAA | 702 | 1298 | 1103 | NA |
| AD-27135.1 | CGGUGACCCUGGGGACUUU | 93 | AAAGUCCCCAGGGUCACCG | 703 | 1325 | 1130 | NA |
| AD-27136.1 | GGUGACCCUGGGGACUUUG | 94 | CAAAGUCCCCAGGGUCACC | 704 | 1326 | 1131 | NA |
| AD-27137.1 | GGGACUUUGGGGACCAACU | 95 | AGUUGGUCCCCAAAGUCCC | 705 | 1336 | 1141 | NA |
| AD-27138.1 | GGACUUUGGGGACCAACUU | 96 | AAGUUGGUCCCCAAAGUCC | 706 | 1337 | 1142 | NA |
| AD-27219.1 | UGAAGGAGGAGACCCACCU | 97 | AGGUGGGUCUCCUCCUUCA | 707 | 536 | NA | NA |
| AD-27220.1 | GCCUUCUUCCUGGCUUCCU | 98 | AGGAAGCCAGGAAGAAGGC | 708 | 641 | NA | NA |
| AD-27221.1 | GGAGGACUCCUCUGUCUUU | 99 | AAAGACAGAGGAGUCCUCC | 709 | 723 | NA | NA |
| AD-27222.1 | UGGUCACCGACUUCGAGAA | 100 | UUCUCGAAGUCGGUGACCA | 710 | 893 | NA | NA |
| AD-27223.1 | GGCCAGCAAGUGUGACAGU | 101 | ACUGUCACACUUGCUGGCC | 711 | 948 | NA | NA |
| AD-27224.1 | UCAUGGCACCCACCUGGCA | 102 | UGCCAGGUGGGUGCCAUGA | 712 | 966 | NA | NA |
| AD-27225.1 | AAGCCAGCUGGUCCAGCCU | 103 | AGGCUGGACCAGCUGGCUU | 713 | 1110 | NA | NA |
| AD-27226.1 | AGCUCCCGAGGUCAUCACA | 104 | UGUGAUGACCUCGGGAGCU | 714 | 1278 | NA | NA |
| AD-27227.1 | UGGGGCCACCAAUGCCCAA | 105 | UUGGGCAUUGGUGGCCCCA | 715 | 1299 | NA | NA |
| AD-27228.1 | AAGACCAGCCGGUGACCCU | 106 | AGGGUCACCGGCUGGUCUU | 716 | 1316 | NA | NA |
| AD-27229.1 | GCACCUGCUUUGUGUCACA | 107 | UGUGACACAAAGCAGGUGC | 717 | 1418 | NA | NA |
| AD-27230.1 | GCUGUUUUGCAGGACUGUA | 108 | UACAGUCCUGCAAAACAGC | 718 | 1653 | NA | NA |
| AD-27231.1 | GCCUACACGGAUGGCCACA | 109 | UGUGGCCAUCCGUGUAGGC | 719 | 1689 | NA | NA |
| AD-27232.1 | GCCAACUGCAGCGUCCACA | 110 | UGUGGACGCUGCAGUUGGC | 720 | 1885 | NA | NA |
| AD-27233.1 | ACACAGCUCCACCAGCUGA | 111 | UCAGCUGGUGGAGCUGUGU | 721 | 1901 | NA | NA |
| AD-27234.1 | ACAGGGCCACGUCCUCACA | 112 | UGUGAGGACGUGGCCCUGU | 722 | 1953 | NA | NA |
| AD-27235.1 | UAGUCAGGAGCCGGGACGU | 113 | ACGUCCCGGCUCCUGACUA | 723 | 2255 | NA | NA |
| AD-27236.1 | UACAGGCAGCACCAGCGAA | 114 | UUCGCUGGUGCUGCCUGUA | 724 | 2280 | NA | NA |
| AD-27237.1 | ACAGCCGUUGCCAUCUGCU | 115 | AGCAGAUGGCAACGGCUGU | 725 | 2308 | NA | NA |
| AD-27238.1 | AAGGGCUGGGGCUGAGCUU | 116 | AAGCUCAGCCCCAGCCCUU | 726 | 2406 | NA | NA |
| AD-27239.1 | AGGGCUGGGGCUGAGCUUU | 117 | AAAGCUCAGCCCCAGCCCU | 727 | 2407 | NA | NA |
| AD-27240.1 | UCUCAGCCCUCCAUGGCCU | 118 | AGGCCAUGGAGGGCUGAGA | 728 | 2449 | NA | NA |
| AD-27241.1 | GCUGCCAGCUGCUCCCAAU | 119 | AUUGGGAGCAGCUGGCAGC | 729 | 2651 | NA | NA |
| AD-27242.1 | GGUCUCCACCAAGGAGGCA | 120 | UGCCUCCUUGGUGGAGACC | 730 | 2737 | NA | NA |
| AD-27243.1 | GCAGGAUUCUUCCCAUGGA | 121 | UCCAUGGGAAGAAUCCUGC | 731 | 2753 | NA | NA |
| AD-27244.1 | GUGCUGAUGGCCCUCAUCU | 122 | AGAUGAGGGCCAUCAGCAC | 732 | 2831 | NA | NA |
| AD-27245.1 | UGGCCCUCAUCUCCAGCUA | 123 | UAGCUGGAGAUGAGGGCCA | 733 | 2838 | NA | NA |
| AD-27246.1 | UUAGCUUUCUGGAUGGCAU | 124 | AUGCCAUCCAGAAAGCUAA | 734 | 2898 | NA | NA |
| AD-27247.1 | CUGCUCUAUGCCAGGCUGU | 125 | ACAGCCUGGCAUAGAGCAG | 735 | 2991 | 2794 | NA |
| AD-27248.1 | GCUCUGAAGCCAAGCCUCU | 126 | AGAGGCUUGGCUUCAGAGC | 736 | 3226 | NA | NA |
| AD-27249.1 | GAACGAUGCCUGCAGGCAU | 127 | AUGCCUGCAGGCAUCGUUC | 737 | 3337 | NA | NA |
| AD-27250.1 | AACAACUGUCCCUCCUUGA | 128 | UCAAGGAGGGACAGUUGUU | 738 | 3436 | NA | NA |
| AD-27251.1 | GUUGCCUUUUUACAGCCAA | 129 | UUGGCUGUAAAAAGGCAAC | 739 | 3508 | NA | NA |
| AD-27252.1 | UUCUAGACCUGUUUUGCUUUU | 130 | AAGCAAAACAGGUCUAGAAUU | 740 | 3530 | 3306 | NA |
| AD-27253.1 | UUCUAGACCUGUUUUGCUUUU | 131 | AAGCAAAACAGGUCUAGAAUU | 741 | 3530 | 3306 | NA |
| AD-27254.1 | UUCUAGACCUGUUUUGCUUUU | 132 | AAGCAAAACAGGUCUAGAAUU | 742 | 3530 | 3306 | NA |
| AD-27255.1 | UUCUAGACCUGUUUUGCUUUU | 133 | AAGCAAAACAGGUCUAGAAUU | 743 | 3530 | 3306 | NA |
| AD-27256.1 | UUCUAGACCUGUUUUGCUUUU | 134 | AAGCAAAACAGGUCUAGAAUU | 744 | 3530 | 3306 | NA |
| AD-27257.1 | UUCUAGACCUGUUUUGCUUUU | 135 | AAGCAAAACAGGUCUAGAAUU | 745 | 3530 | 3306 | NA |
| AD-27258.1 | UUCUAGACCUGUUUUGCUUUU | 136 | AAGCAAAACAGGUCUAGAAUU | 746 | 3530 | 3306 | NA |
| AD-27259.1 | UUCUAGACCUGUUUUGCUU | 137 | AAGCAAAACAGGUCUAGAA | 747 | 3530 | 3306 | NA |
| AD-27260.1 | UCAGCUCCUGCACAGUCCU | 138 | AGGACUGUGCAGGAGCUGA | 748 | 183 | NA | NA |
| AD-27262.1 | CCAAGGGAAGGGCACGGUU | 139 | AACCGUGCCCUUCCCUUGG | 749 | 1056 | NA | NA |
| AD-27265.1 | CUGGCACCUACGUGGUGGU | 140 | ACCACCACGUAGGUGCCAG | 750 | 515 | NA | NA |
| AD-27267.1 | UCCUAGACCUGUUUUGCUU | 141 | AAGCAAAACAGGUCUAGGA | 751 | NA | NA | NA |
| AD-27268.1 | UUCUAGACCUGUUUUGCUU | 142 | AAGCAAAACAGGUCUAGAAT | 752 | 3530 | 3306 | NA |
| AD-27269.1 | UUCUAGACCUGUUUUGCUU | 143 | AAGCAAAACAGGUCUAGAA | 753 | 3530 | 3306 | NA |
| AD-27270.1 | UUCUAGACCUGUUUUGCUU | 144 | AAGCAAAACAGGUCUAGA | 754 | 3530 | 3306 | NA |
| AD-27271.1 | UUCUAGACCUGUUUUGCUU | 145 | AAGCAAAACAGGUCUAG | 755 | 3530 | 3306 | NA |
| AD-27272.1 | UUCUAGACCUGUUUUGCUU | 146 | AAGCAAAACAGGUCUA | 756 | 3530 | 3306 | NA |
| AD-27273.1 | UUCUAGACCUGUUUUGCUU | 147 | AAGCAAAACAGGUCU | 757 | 3530 | 3306 | NA |
| AD-27274.1 | UUCUAGACCUGUUUUGCUU | 148 | AGCAAAACAGGUCUAGAATT | 758 | 3530 | 3306 | NA |
| AD-27275.1 | UUCUAGACCUGUUUUGCUU | 149 | GCAAAACAGGUCUAGAATT | 759 | 3530 | 3306 | NA |
| AD-27276.1 | UUCUAGACCUGUUUUGCUU | 150 | CAAAACAGGUCUAGAATT | 760 | 3530 | 3306 | NA |
| AD-27277.1 | UUCUAGACCUGUUUUGCUU | 151 | AAAACAGGUCUAGAATT | 761 | 3530 | 3306 | NA |
| AD-27278.1 | UUCUAGACCUGUUUUGCUU | 152 | AAACAGGUCUAGAATT | 762 | 3530 | 3306 | NA |
| AD-27279.1 | UUCUAGACCUGUUUUGCUU | 153 | AACAGGUCUAGAATT | 763 | 3530 | 3306 | NA |
| AD-27292.1 | GACUUUGGGGACCAACUUU | 154 | AAAGUUGGUCCCCAAAGUC | 764 | 1338 | 1143 | NA |
| AD-27293.1 | ACUUUGGGGACCAACUUUG | 155 | CAAAGUUGGUCCCCAAAGU | 765 | 1339 | 1144 | NA |
| AD-27294.1 | GGGACCAACUUUGGCCGCU | 156 | AGCGGCCAAAGUUGGUCCC | 766 | 1345 | 1150 | NA |
| AD-27295.1 | GGACCAACUUUGGCCGCUG | 157 | CAGCGGCCAAAGUUGGUCC | 767 | 1346 | 1151 | NA |
| AD-27296.1 | GACCAACUUUGGCCGCUGU | 158 | ACAGCGGCCAAAGUUGGUC | 768 | 1347 | 1152 | NA |
| AD-27297.1 | CCAACUUUGGCCGCUGUGU | 159 | ACACAGCGGCCAAAGUUGG | 769 | 1349 | 1154 | NA |
| AD-27298.1 | ACUUUGGCCGCUGUGUGGA | 160 | UCCACACAGCGGCCAAAGU | 770 | 1352 | 1157 | NA |
| AD-27299.1 | CUUUGGCCGCUGUGUGGAC | 161 | GUCCACACAGCGGCCAAAG | 771 | 1353 | 1158 | NA |
| AD-27300.1 | UUGGCCGCUGUGUGGACCU | 162 | AGGUCCACACAGCGGCCAA | 772 | 1355 | 1160 | NA |
| AD-27301.1 | GCCGCUGUGUGGACCUCUU | 163 | AAGAGGUCCACACAGCGGC | 773 | 1358 | 1163 | NA |
| AD-27302.1 | CCGCUGUGUGGACCUCUUU | 164 | AAAGAGGUCCACACAGCGG | 774 | 1359 | 1164 | NA |
| AD-27303.1 | UGUGGACCUCUUUGCCCCA | 165 | UGGGGCAAAGAGGUCCACA | 775 | 1365 | 1170 | NA |
| AD-27304.1 | GUGGACCUCUUUGCCCCAG | 166 | CUGGGGCAAAGAGGUCCAC | 776 | 1366 | 1171 | NA |
| AD-27305.1 | CCCAGGGGAGGACAUCAUU | 167 | AAUGAUGUCCUCCCCUGGG | 777 | 1380 | 1185 | NA |
| AD-27306.1 | CCAGGGGAGGACAUCAUUG | 168 | CAAUGAUGUCCUCCCCUGG | 778 | 1381 | 1186 | NA |
| AD-27307.1 | AGGGGAGGACAUCAUUGGU | 169 | ACCAAUGAUGUCCUCCCCU | 779 | 1383 | 1188 | NA |
| AD-27308.1 | GGGGAGGACAUCAUUGGUG | 170 | CACCAAUGAUGUCCUCCCC | 780 | 1384 | 1189 | NA |
| AD-27309.1 | GAGGACAUCAUUGGUGCCU | 171 | AGGCACCAAUGAUGUCCUC | 781 | 1387 | 1192 | NA |
| AD-27310.1 | AGGACAUCAUUGGUGCCUC | 172 | GAGGCACCAAUGAUGUCCU | 782 | 1388 | 1193 | NA |
| AD-27311.1 | ACAUCAUUGGUGCCUCCAG | 173 | CUGGAGGCACCAAUGAUGU | 783 | 1391 | 1196 | NA |
| AD-27312.1 | CAUUGGUGCCUCCAGCGAC | 174 | GUCGCUGGAGGCACCAAUG | 784 | 1395 | 1200 | NA |
| AD-27313.1 | AUUGGUGCCUCCAGCGACU | 175 | AGUCGCUGGAGGCACCAAU | 785 | 1396 | 1201 | NA |
| AD-27314.1 | UUGGUGCCUCCAGCGACUG | 176 | CAGUCGCUGGAGGCACCAA | 786 | 1397 | 1202 | NA |
| AD-27315.1 | UCCAGCGACUGCAGCACCU | 177 | AGGUGCUGCAGUCGCUGGA | 787 | 1405 | 1210 | NA |
| AD-27316.1 | AGCGACUGCAGCACCUGCU | 178 | AGCAGGUGCUGCAGUCGCU | 788 | 1408 | 1213 | NA |
| AD-27317.1 | GCGACUGCAGCACCUGCUU | 179 | AAGCAGGUGCUGCAGUCGC | 789 | 1409 | 1214 | NA |
| AD-27318.1 | CGACUGCAGCACCUGCUUU | 180 | AAAGCAGGUGCUGCAGUCG | 790 | 1410 | 1215 | NA |
| AD-27319.1 | GACUGCAGCACCUGCUUUG | 181 | CAAAGCAGGUGCUGCAGUC | 791 | 1411 | 1216 | NA |
| AD-27320.1 | ACUGCAGCACCUGCUUUGU | 182 | ACAAAGCAGGUGCUGCAGU | 792 | 1412 | 1217 | NA |
| AD-27321.1 | CUGCAGCACCUGCUUUGUG | 183 | CACAAAGCAGGUGCUGCAG | 793 | 1413 | 1218 | NA |
| AD-27322.1 | UGCAGCACCUGCUUUGUGU | 184 | ACACAAAGCAGGUGCUGCA | 794 | 1414 | 1219 | NA |
| AD-27323.1 | GCAGCACCUGCUUUGUGUC | 185 | GACACAAAGCAGGUGCUGC | 795 | 1415 | 1220 | NA |
| AD-27324.1 | CAGCACCUGCUUUGUGUCA | 186 | UGACACAAAGCAGGUGCUG | 796 | 1416 | 1221 | NA |
| AD-27325.1 | UGCCCACGUGGCUGGCAUU | 187 | AAUGCCAGCCACGUGGGCA | 797 | 1458 | 1263 | NA |
| AD-27326.1 | CCACGUGGCUGGCAUUGCA | 188 | UGCAAUGCCAGCCACGUGG | 798 | 1461 | 1266 | NA |
| AD-27327.1 | CACGUGGCUGGCAUUGCAG | 189 | CUGCAAUGCCAGCCACGUG | 799 | 1462 | 1267 | NA |
| AD-27328.1 | GUGGCUGGCAUUGCAGCCA | 190 | UGGCUGCAAUGCCAGCCAC | 800 | 1465 | 1270 | NA |
| AD-27329.1 | UGGCUGGCAUUGCAGCCAU | 191 | AUGGCUGCAAUGCCAGCCA | 801 | 1466 | 1271 | NA |
| AD-27330.1 | GGCUGGCAUUGCAGCCAUG | 192 | CAUGGCUGCAAUGCCAGCC | 802 | 1467 | 1272 | NA |
| AD-27331.1 | GCUGGCAUUGCAGCCAUGA | 193 | UCAUGGCUGCAAUGCCAGC | 803 | 1468 | 1273 | NA |
| AD-27332.1 | CUGGCAUUGCAGCCAUGAU | 194 | AUCAUGGCUGCAAUGCCAG | 804 | 1469 | 1274 | NA |
| AD-27333.1 | UGGCAUUGCAGCCAUGAUG | 195 | CAUCAUGGCUGCAAUGCCA | 805 | 1470 | 1275 | NA |
| AD-27334.1 | GCAUUGCAGCCAUGAUGCU | 196 | AGCAUCAUGGCUGCAAUGC | 806 | 1472 | 1277 | NA |
| AD-27335.1 | CAUUGCAGCCAUGAUGCUG | 197 | CAGCAUCAUGGCUGCAAUG | 807 | 1473 | 1278 | NA |
| AD-27336.1 | AUUGCAGCCAUGAUGCUGU | 198 | ACAGCAUCAUGGCUGCAAU | 808 | 1474 | 1279 | NA |
| AD-27337.1 | UUGCAGCCAUGAUGCUGUC | 199 | GACAGCAUCAUGGCUGCAA | 809 | 1475 | 1280 | NA |
| AD-27338.1 | UGCAGCCAUGAUGCUGUCU | 200 | AGACAGCAUCAUGGCUGCA | 810 | 1476 | 1281 | NA |
| AD-27339.1 | GCAGCCAUGAUGCUGUCUG | 201 | CAGACAGCAUCAUGGCUGC | 811 | 1477 | 1282 | NA |
| AD-27340.1 | CCAUGAUGCUGUCUGCCGA | 202 | UCGGCAGACAGCAUCAUGG | 812 | 1481 | 1286 | NA |
| AD-27341.1 | CAUGAUGCUGUCUGCCGAG | 203 | CUCGGCAGACAGCAUCAUG | 813 | 1482 | 1287 | NA |
| AD-27342.1 | CUGGCCGAGUUGAGGCAGA | 204 | UCUGCCUCAACUCGGCCAG | 814 | 1513 | 1318 | NA |
| AD-27343.1 | UGGCCGAGUUGAGGCAGAG | 205 | CUCUGCCUCAACUCGGCCA | 815 | 1514 | 1319 | NA |
| AD-27344.1 | GGCCGAGUUGAGGCAGAGA | 206 | UCUCUGCCUCAACUCGGCC | 816 | 1515 | 1320 | NA |
| AD-27345.1 | GCCGAGUUGAGGCAGAGAC | 207 | GUCUCUGCCUCAACUCGGC | 817 | 1516 | 1321 | NA |
| AD-27346.1 | CCGAGUUGAGGCAGAGACU | 208 | AGUCUCUGCCUCAACUCGG | 818 | 1517 | 1322 | NA |
| AD-27347.1 | CGAGUUGAGGCAGAGACUG | 209 | CAGUCUCUGCCUCAACUCG | 819 | 1518 | 1323 | NA |
| AD-27348.1 | GAGUUGAGGCAGAGACUGA | 210 | UCAGUCUCUGCCUCAACUC | 820 | 1519 | 1324 | NA |
| AD-27349.1 | AGUUGAGGCAGAGACUGAU | 211 | AUCAGUCUCUGCCUCAACU | 821 | 1520 | 1325 | NA |
| AD-27350.1 | UGAGGCAGAGACUGAUCCA | 212 | UGGAUCAGUCUCUGCCUCA | 822 | 1523 | 1328 | NA |
| AD-27351.1 | GAGGCAGAGACUGAUCCAC | 213 | GUGGAUCAGUCUCUGCCUC | 823 | 1524 | 1329 | NA |
| AD-27352.1 | AGGCAGAGACUGAUCCACU | 214 | AGUGGAUCAGUCUCUGCCU | 824 | 1525 | 1330 | NA |
| AD-27353.1 | GGCAGAGACUGAUCCACUU | 215 | AAGUGGAUCAGUCUCUGCC | 825 | 1526 | 1331 | NA |
| AD-27354.1 | CAGAGACUGAUCCACUUCU | 216 | AGAAGUGGAUCAGUCUCUG | 826 | 1528 | 1333 | NA |
| AD-27355.1 | GAGACUGAUCCACUUCUCU | 217 | AGAGAAGUGGAUCAGUCUC | 827 | 1530 | 1335 | NA |
| AD-27356.1 | AGACUGAUCCACUUCUCUG | 218 | CAGAGAAGUGGAUCAGUCU | 828 | 1531 | 1336 | NA |
| AD-27357.1 | CUGAUCCACUUCUCUGCCA | 219 | UGGCAGAGAAGUGGAUCAG | 829 | 1534 | 1339 | NA |
| AD-27358.1 | UGAUCCACUUCUCUGCCAA | 220 | UUGGCAGAGAAGUGGAUCA | 830 | 1535 | 1340 | NA |
| AD-27359.1 | GAUCCACUUCUCUGCCAAA | 221 | UUUGGCAGAGAAGUGGAUC | 831 | 1536 | 1341 | NA |
| AD-27360.1 | AUCCACUUCUCUGCCAAAG | 222 | CUUUGGCAGAGAAGUGGAU | 832 | 1537 | 1342 | NA |
| AD-27361.1 | UCCACUUCUCUGCCAAAGA | 223 | UCUUUGGCAGAGAAGUGGA | 833 | 1538 | 1343 | NA |
| AD-27362.1 | CCACUUCUCUGCCAAAGAU | 224 | AUCUUUGGCAGAGAAGUGG | 834 | 1539 | 1344 | NA |
| AD-27363.1 | CACUUCUCUGCCAAAGAUG | 225 | CAUCUUUGGCAGAGAAGUG | 835 | 1540 | 1345 | NA |
| AD-27364.1 | ACUUCUCUGCCAAAGAUGU | 226 | ACAUCUUUGGCAGAGAAGU | 836 | 1541 | 1346 | NA |
| AD-27365.1 | CUUCUCUGCCAAAGAUGUC | 227 | GACAUCUUUGGCAGAGAAG | 837 | 1542 | 1347 | NA |
| AD-27366.1 | UCUCUGCCAAAGAUGUCAU | 228 | AUGACAUCUUUGGCAGAGA | 838 | 1544 | 1349 | NA |
| AD-27367.1 | UCUGCCAAAGAUGUCAUCA | 229 | UGAUGACAUCUUUGGCAGA | 839 | 1546 | 1351 | NA |
| AD-27368.1 | CUGCCAAAGAUGUCAUCAA | 230 | UUGAUGACAUCUUUGGCAG | 840 | 1547 | 1352 | NA |
| AD-27369.1 | UGCCAAAGAUGUCAUCAAU | 231 | AUUGAUGACAUCUUUGGCA | 841 | 1548 | 1353 | NA |
| AD-27370.1 | GCCAAAGAUGUCAUCAAUG | 232 | CAUUGAUGACAUCUUUGGC | 842 | 1549 | 1354 | NA |
| AD-27371.1 | CCAAAGAUGUCAUCAAUGA | 233 | UCAUUGAUGACAUCUUUGG | 843 | 1550 | 1355 | NA |
| AD-27372.1 | CAAAGAUGUCAUCAAUGAG | 234 | CUCAUUGAUGACAUCUUUG | 844 | 1551 | 1356 | NA |
| AD-27373.1 | GAUGUCAUCAAUGAGGCCU | 235 | AGGCCUCAUUGAUGACAUC | 845 | 1555 | 1360 | NA |
| AD-27374.1 | AUGUCAUCAAUGAGGCCUG | 236 | CAGGCCUCAUUGAUGACAU | 846 | 1556 | 1361 | NA |
| AD-27375.1 | GUCAUCAAUGAGGCCUGGU | 237 | ACCAGGCCUCAUUGAUGAC | 847 | 1558 | 1363 | NA |
| AD-27376.1 | UCAUCAAUGAGGCCUGGUU | 238 | AACCAGGCCUCAUUGAUGA | 848 | 1559 | 1364 | NA |
| AD-27377.1 | CAUCAAUGAGGCCUGGUUC | 239 | GAACCAGGCCUCAUUGAUG | 849 | 1560 | 1365 | NA |
| AD-27378.1 | CAAUGAGGCCUGGUUCCCU | 240 | AGGGAACCAGGCCUCAUUG | 850 | 1563 | 1368 | NA |
| AD-27379.1 | AAUGAGGCCUGGUUCCCUG | 241 | CAGGGAACCAGGCCUCAUU | 851 | 1564 | 1369 | NA |
| AD-27380.1 | AUGAGGCCUGGUUCCCUGA | 242 | UCAGGGAACCAGGCCUCAU | 852 | 1565 | 1370 | NA |
| AD-27381.1 | UGAGGCCUGGUUCCCUGAG | 243 | CUCAGGGAACCAGGCCUCA | 853 | 1566 | 1371 | NA |
| AD-27382.1 | AGGCCUGGUUCCCUGAGGA | 244 | UCCUCAGGGAACCAGGCCU | 854 | 1568 | 1373 | NA |
| AD-27383.1 | GAGGACCAGCGGGUACUGA | 245 | UCAGUACCCGCUGGUCCUC | 855 | 1582 | 1387 | NA |
| AD-27384.1 | AGGACCAGCGGGUACUGAC | 246 | GUCAGUACCCGCUGGUCCU | 856 | 1583 | 1388 | NA |
| AD-27385.1 | GGGCAGGUUGGCAGCUGUU | 247 | AACAGCUGCCAACCUGCCC | 857 | 1640 | 1445 | NA |
| AD-27386.1 | GGCAGGUUGGCAGCUGUUU | 248 | AAACAGCUGCCAACCUGCC | 858 | 1641 | 1446 | NA |
| AD-27387.1 | GCAGGUUGGCAGCUGUUUU | 249 | AAAACAGCUGCCAACCUGC | 859 | 1642 | 1447 | NA |
| AD-27493.1 | AGCCUGGAGGAGUGAGCCA | 250 | UGGCUCACUCCUCCAGGCU | 860 | 59 | NA | NA |
| AD-27494.1 | UGGAGGAGUGAGCCAGGCA | 251 | UGCCUGGCUCACUCCUCCA | 861 | 63 | NA | NA |
| AD-27495.1 | GAGGAGUGAGCCAGGCAGU | 252 | ACUGCCUGGCUCACUCCUC | 862 | 65 | NA | NA |
| AD-27496.1 | AGGAGUGAGCCAGGCAGUG | 253 | CACUGCCUGGCUCACUCCU | 863 | 66 | NA | NA |
| AD-27497.1 | GGAGUGAGCCAGGCAGUGA | 254 | UCACUGCCUGGCUCACUCC | 864 | 67 | NA | NA |
| AD-27498.1 | GAGUGAGCCAGGCAGUGAG | 255 | CUCACUGCCUGGCUCACUC | 865 | 68 | NA | NA |
| AD-27499.1 | AGUGAGCCAGGCAGUGAGA | 256 | UCUCACUGCCUGGCUCACU | 866 | 69 | NA | NA |
| AD-27500.1 | GUGAGCCAGGCAGUGAGAC | 257 | GUCUCACUGCCUGGCUCAC | 867 | 70 | NA | NA |
| AD-27501.1 | UGAGCCAGGCAGUGAGACU | 258 | AGUCUCACUGCCUGGCUCA | 868 | 71 | NA | NA |
| AD-27502.1 | GAGCCAGGCAGUGAGACUG | 259 | CAGUCUCACUGCCUGGCUC | 869 | 72 | NA | NA |
| AD-27503.1 | CCAGCUCCCAGCCAGGAUU | 260 | AAUCCUGGCUGGGAGCUGG | 870 | 130 | NA | NA |
| AD-27504.1 | CAGCUCCCAGCCAGGAUUC | 261 | GAAUCCUGGCUGGGAGCUG | 871 | 131 | NA | NA |
| AD-27505.1 | CAGCUCCUGCACAGUCCUC | 262 | GAGGACUGUGCAGGAGCUG | 872 | 184 | NA | NA |
| AD-27506.1 | UCCUGCACAGUCCUCCCCA | 263 | UGGGGAGGACUGUGCAGGA | 873 | 188 | NA | NA |
| AD-27507.1 | CACGGCCUCUAGGUCUCCU | 264 | AGGAGACCUAGAGGCCGUG | 874 | 242 | 47 | NA |
| AD-27508.1 | ACGGCCUCUAGGUCUCCUC | 265 | GAGGAGACCUAGAGGCCGU | 875 | 243 | 48 | NA |
| AD-27509.1 | AGGACGAGGACGGCGACUA | 266 | UAGUCGCCGUCCUCGUCCU | 876 | 386 | 191 | NA |
| AD-27510.1 | ACGAGGACGGCGACUACGA | 267 | UCGUAGUCGCCGUCCUCGU | 877 | 389 | 194 | NA |
| AD-27511.1 | AGGACGGCGACUACGAGGA | 268 | UCCUCGUAGUCGCCGUCCU | 878 | 392 | 197 | NA |
| AD-27512.1 | ACGGCGACUACGAGGAGCU | 269 | AGCUCCUCGUAGUCGCCGU | 879 | 395 | 200 | NA |
| AD-27513.1 | GCGACUACGAGGAGCUGGU | 270 | ACCAGCUCCUCGUAGUCGC | 880 | 398 | 203 | NA |
| AD-27514.1 | CGACUACGAGGAGCUGGUG | 271 | CACCAGCUCCUCGUAGUCG | 881 | 399 | 204 | NA |
| AD-27515.1 | ACUACGAGGAGCUGGUGCU | 272 | AGCACCAGCUCCUCGUAGU | 882 | 401 | 206 | NA |
| AD-27516.1 | CUACGAGGAGCUGGUGCUA | 273 | UAGCACCAGCUCCUCGUAG | 883 | 402 | 207 | NA |
| AD-27517.1 | UACGAGGAGCUGGUGCUAG | 274 | CUAGCACCAGCUCCUCGUA | 884 | 403 | 208 | NA |
| AD-27518.1 | GAGGAGCUGGUGCUAGCCU | 275 | AGGCUAGCACCAGCUCCUC | 885 | 406 | NA | NA |
| AD-27519.1 | AGGAGCUGGUGCUAGCCUU | 276 | AAGGCUAGCACCAGCUCCU | 886 | 407 | NA | NA |
| AD-27520.1 | UGGUGCUAGCCUUGCGUUC | 277 | GAACGCAAGGCUAGCACCA | 887 | 413 | NA | NA |
| AD-27521.1 | GCUAGCCUUGCGUUCCGAG | 278 | CUCGGAACGCAAGGCUAGC | 888 | 417 | NA | NA |
| AD-27522.1 | AGCCUUGCGUUCCGAGGAG | 279 | CUCCUCGGAACGCAAGGCU | 889 | 420 | NA | NA |
| AD-27523.1 | CCUUGCGUUCCGAGGAGGA | 280 | UCCUCCUCGGAACGCAAGG | 890 | 422 | NA | NA |
| AD-27524.1 | CUUGCGUUCCGAGGAGGAC | 281 | GUCCUCCUCGGAACGCAAG | 891 | 423 | NA | NA |
| AD-27525.1 | ACAGCCACCUUCCACCGCU | 282 | AGCGGUGGAAGGUGGCUGU | 892 | 472 | 277 | NA |
| AD-27526.1 | UGCGCCAAGGAUCCGUGGA | 283 | UCCACGGAUCCUUGGCGCA | 893 | 490 | 295 | NA |
| AD-27527.1 | GCACCUACGUGGUGGUGCU | 284 | AGCACCACCACGUAGGUGC | 894 | 518 | 323 | NA |
| AD-27528.1 | CACCUACGUGGUGGUGCUG | 285 | CAGCACCACCACGUAGGUG | 895 | 519 | 324 | NA |
| AD-27529.1 | ACCUACGUGGUGGUGCUGA | 286 | UCAGCACCACCACGUAGGU | 896 | 520 | 325 | NA |
| AD-27530.1 | CCUACGUGGUGGUGCUGAA | 287 | UUCAGCACCACCACGUAGG | 897 | 521 | 326 | NA |
| AD-27531.1 | CUACGUGGUGGUGCUGAAG | 288 | CUUCAGCACCACCACGUAG | 898 | 522 | 327 | NA |
| AD-27532.1 | ACGUGGUGGUGCUGAAGGA | 289 | UCCUUCAGCACCACCACGU | 899 | 524 | 329 | NA |
| AD-27533.1 | CGUGGUGGUGCUGAAGGAG | 290 | CUCCUUCAGCACCACCACG | 900 | 525 | 330 | NA |
| AD-27534.1 | UGGUGGUGCUGAAGGAGGA | 291 | UCCUCCUUCAGCACCACCA | 901 | 527 | 332 | NA |
| AD-27535.1 | GGUGGUGCUGAAGGAGGAG | 292 | CUCCUCCUUCAGCACCACC | 902 | 528 | 333 | NA |
| AD-27536.1 | GUGGUGCUGAAGGAGGAGA | 293 | UCUCCUCCUUCAGCACCAC | 903 | 529 | 334 | NA |
| AD-27537.1 | UGGUGCUGAAGGAGGAGAC | 294 | GUCUCCUCCUUCAGCACCA | 904 | 530 | 335 | NA |
| AD-27538.1 | UGCUGAAGGAGGAGACCCA | 295 | UGGGUCUCCUCCUUCAGCA | 905 | 533 | 338 | NA |
| AD-27539.1 | GCUGAAGGAGGAGACCCAC | 296 | GUGGGUCUCCUCCUUCAGC | 906 | 534 | 339 | NA |
| AD-27540.1 | UCGCAGUCAGAGCGCACUG | 297 | CAGUGCGCUCUGACUGCGA | 907 | 556 | 361 | NA |
| AD-27541.1 | GCCGGGGAUACCUCACCAA | 298 | UUGGUGAGGUAUCCCCGGC | 908 | 602 | 407 | NA |
| AD-27542.1 | CCGGGGAUACCUCACCAAG | 299 | CUUGGUGAGGUAUCCCCGG | 909 | 603 | 408 | NA |
| AD-27543.1 | CGGGGAUACCUCACCAAGA | 300 | UCUUGGUGAGGUAUCCCCG | 910 | 604 | 409 | NA |
| AD-27544.1 | GGGGAUACCUCACCAAGAU | 301 | AUCUUGGUGAGGUAUCCCC | 911 | 605 | 410 | NA |
| AD-27545.1 | GAUACCUCACCAAGAUCCU | 302 | AGGAUCUUGGUGAGGUAUC | 912 | 608 | 413 | NA |
| AD-27546.1 | AUACCUCACCAAGAUCCUG | 303 | CAGGAUCUUGGUGAGGUAU | 913 | 609 | 414 | NA |
| AD-27547.1 | ACCUCACCAAGAUCCUGCA | 304 | UGCAGGAUCUUGGUGAGGU | 914 | 611 | 416 | NA |
| AD-27548.1 | CCUCACCAAGAUCCUGCAU | 305 | AUGCAGGAUCUUGGUGAGG | 915 | 612 | 417 | NA |
| AD-27549.1 | CUCACCAAGAUCCUGCAUG | 306 | CAUGCAGGAUCUUGGUGAG | 916 | 613 | 418 | NA |
| AD-27550.1 | UCACCAAGAUCCUGCAUGU | 307 | ACAUGCAGGAUCUUGGUGA | 917 | 614 | 419 | NA |
| AD-27551.1 | CACCAAGAUCCUGCAUGUC | 308 | GACAUGCAGGAUCUUGGUG | 918 | 615 | 420 | NA |
| AD-27552.1 | ACCAAGAUCCUGCAUGUCU | 309 | AGACAUGCAGGAUCUUGGU | 919 | 616 | 421 | NA |
| AD-27553.1 | CCAAGAUCCUGCAUGUCUU | 310 | AAGACAUGCAGGAUCUUGG | 920 | 617 | 422 | NA |
| AD-27554.1 | CAAGAUCCUGCAUGUCUUC | 311 | GAAGACAUGCAGGAUCUUG | 921 | 618 | 423 | NA |
| AD-27555.1 | AGAUCCUGCAUGUCUUCCA | 312 | UGGAAGACAUGCAGGAUCU | 922 | 620 | 425 | NA |
| AD-27556.1 | GAUCCUGCAUGUCUUCCAU | 313 | AUGGAAGACAUGCAGGAUC | 923 | 621 | 426 | NA |
| AD-27557.1 | CCUUCUUCCUGGCUUCCUG | 314 | CAGGAAGCCAGGAAGAAGG | 924 | 642 | 447 | NA |
| AD-27558.1 | UUCUUCCUGGCUUCCUGGU | 315 | ACCAGGAAGCCAGGAAGAA | 925 | 644 | 449 | NA |
| AD-27559.1 | UCUUCCUGGCUUCCUGGUG | 316 | CACCAGGAAGCCAGGAAGA | 926 | 645 | 450 | NA |
| AD-27560.1 | CUUCCUGGCUUCCUGGUGA | 317 | UCACCAGGAAGCCAGGAAG | 927 | 646 | 451 | NA |
| AD-27561.1 | UUCCUGGCUUCCUGGUGAA | 318 | UUCACCAGGAAGCCAGGAA | 928 | 647 | 452 | NA |
| AD-27562.1 | UCCUGGCUUCCUGGUGAAG | 319 | CUUCACCAGGAAGCCAGGA | 929 | 648 | 453 | NA |
| AD-27563.1 | CCUGGCUUCCUGGUGAAGA | 320 | UCUUCACCAGGAAGCCAGG | 930 | 649 | 454 | NA |
| AD-27564.1 | CUGGCUUCCUGGUGAAGAU | 321 | AUCUUCACCAGGAAGCCAG | 931 | 650 | 455 | NA |
| AD-27565.1 | UGGCUUCCUGGUGAAGAUG | 322 | CAUCUUCACCAGGAAGCCA | 932 | 651 | 456 | NA |
| AD-27566.1 | GGCUUCCUGGUGAAGAUGA | 323 | UCAUCUUCACCAGGAAGCC | 933 | 652 | 457 | NA |
| AD-27567.1 | GCUUCCUGGUGAAGAUGAG | 324 | CUCAUCUUCACCAGGAAGC | 934 | 653 | 458 | NA |
| AD-27568.1 | CUUCCUGGUGAAGAUGAGU | 325 | ACUCAUCUUCACCAGGAAG | 935 | 654 | 459 | NA |
| AD-27569.1 | UUCCUGGUGAAGAUGAGUG | 326 | CACUCAUCUUCACCAGGAA | 936 | 655 | 460 | NA |
| AD-27570.1 | GGUGAAGAUGAGUGGCGAC | 327 | GUCGCCACUCAUCUUCACC | 937 | 660 | 465 | NA |
| AD-27571.1 | UGAAGAUGAGUGGCGACCU | 328 | AGGUCGCCACUCAUCUUCA | 938 | 662 | 467 | NA |
| AD-27572.1 | AGAUGAGUGGCGACCUGCU | 329 | AGCAGGUCGCCACUCAUCU | 939 | 665 | 470 | NA |
| AD-27573.1 | GAUGAGUGGCGACCUGCUG | 330 | CAGCAGGUCGCCACUCAUC | 940 | 666 | 471 | NA |
| AD-27574.1 | UGAGUGGCGACCUGCUGGA | 331 | UCCAGCAGGUCGCCACUCA | 941 | 668 | 473 | NA |
| AD-27575.1 | UGAAGUUGCCCCAUGUCGA | 332 | UCGACAUGGGGCAACUUCA | 942 | 695 | 500 | NA |
| AD-27576.1 | GAAGUUGCCCCAUGUCGAC | 333 | GUCGACAUGGGGCAACUUC | 943 | 696 | 501 | NA |
| AD-27577.1 | AAGUUGCCCCAUGUCGACU | 334 | AGUCGACAUGGGGCAACUU | 944 | 697 | 502 | NA |
| AD-27578.1 | AGUUGCCCCAUGUCGACUA | 335 | UAGUCGACAUGGGGCAACU | 945 | 698 | 503 | NA |
| AD-27579.1 | GUUGCCCCAUGUCGACUAC | 336 | GUAGUCGACAUGGGGCAAC | 946 | 699 | 504 | NA |
| AD-27580.1 | UUGCCCCAUGUCGACUACA | 337 | UGUAGUCGACAUGGGGCAA | 947 | 700 | 505 | NA |
| AD-27581.1 | UGCCCCAUGUCGACUACAU | 338 | AUGUAGUCGACAUGGGGCA | 948 | 701 | 506 | NA |
| AD-27582.1 | GCCCCAUGUCGACUACAUC | 339 | GAUGUAGUCGACAUGGGGC | 949 | 702 | 507 | NA |
| AD-27583.1 | CCAUGUCGACUACAUCGAG | 340 | CUCGAUGUAGUCGACAUGG | 950 | 705 | 510 | NA |
| AD-27584.1 | AUGUCGACUACAUCGAGGA | 341 | UCCUCGAUGUAGUCGACAU | 951 | 707 | 512 | NA |
| AD-27585.1 | UGUCGACUACAUCGAGGAG | 342 | CUCCUCGAUGUAGUCGACA | 952 | 708 | 513 | NA |
| AD-27586.1 | UCGACUACAUCGAGGAGGA | 343 | UCCUCCUCGAUGUAGUCGA | 953 | 710 | 515 | NA |
| AD-27587.1 | CGACUACAUCGAGGAGGAC | 344 | GUCCUCCUCGAUGUAGUCG | 954 | 711 | 516 | NA |
| AD-27588.1 | GACUACAUCGAGGAGGACU | 345 | AGUCCUCCUCGAUGUAGUC | 955 | 712 | 517 | NA |
| AD-27620.1 | CACACAGCUCCACCAGCUG | 346 | CAGCUGGUGGAGCUGUGUG | 956 | 1900 | 1705 | NA |
| AD-27621.1 | AUGGGGACCCGUGUCCACU | 347 | AGUGGACACGGGUCCCCAU | 957 | 1927 | 1732 | NA |
| AD-27622.1 | CACGUCCUCACAGGCUGCA | 348 | UGCAGCCUGUGAGGACGUG | 958 | 1960 | 1765 | NA |
| AD-27623.1 | ACGUCCUCACAGGCUGCAG | 349 | CUGCAGCCUGUGAGGACGU | 959 | 1961 | 1766 | NA |
| AD-27624.1 | GUCCUCACAGGCUGCAGCU | 350 | AGCUGCAGCCUGUGAGGAC | 960 | 1963 | 1768 | NA |
| AD-27625.1 | UCCUCACAGGCUGCAGCUC | 351 | GAGCUGCAGCCUGUGAGGA | 961 | 1964 | 1769 | NA |
| AD-27626.1 | UCACAGGCUGCAGCUCCCA | 352 | UGGGAGCUGCAGCCUGUGA | 962 | 1967 | 1772 | NA |
| AD-27627.1 | ACAGGCUGCAGCUCCCACU | 353 | AGUGGGAGCUGCAGCCUGU | 963 | 1969 | 1774 | NA |
| AD-27628.1 | ACUGGGAGGUGGAGGACCU | 354 | AGGUCCUCCACCUCCCAGU | 964 | 1985 | 1790 | NA |
| AD-27629.1 | CUGGGAGGUGGAGGACCUU | 355 | AAGGUCCUCCACCUCCCAG | 965 | 1986 | 1791 | NA |
| AD-27630.1 | UGGGAGGUGGAGGACCUUG | 356 | CAAGGUCCUCCACCUCCCA | 966 | 1987 | 1792 | NA |
| AD-27631.1 | GAGGUGGAGGACCUUGGCA | 357 | UGCCAAGGUCCUCCACCUC | 967 | 1990 | 1795 | NA |
| AD-27632.1 | AGGUGGAGGACCUUGGCAC | 358 | GUGCCAAGGUCCUCCACCU | 968 | 1991 | 1796 | NA |
| AD-27633.1 | UGGAGGACCUUGGCACCCA | 359 | UGGGUGCCAAGGUCCUCCA | 969 | 1994 | 1799 | NA |
| AD-27634.1 | GAGGACCUUGGCACCCACA | 360 | UGUGGGUGCCAAGGUCCUC | 970 | 1996 | 1801 | NA |
| AD-27635.1 | AGGACCUUGGCACCCACAA | 361 | UUGUGGGUGCCAAGGUCCU | 971 | 1997 | 1802 | NA |
| AD-27636.1 | GGACCUUGGCACCCACAAG | 362 | CUUGUGGGUGCCAAGGUCC | 972 | 1998 | 1803 | NA |
| AD-27637.1 | CACAAGCCGCCUGUGCUGA | 363 | UCAGCACAGGCGGCUUGUG | 973 | 2011 | 1816 | NA |
| AD-27638.1 | ACAAGCCGCCUGUGCUGAG | 364 | CUCAGCACAGGCGGCUUGU | 974 | 2012 | 1817 | NA |
| AD-27639.1 | UGUGCUGAGGCCACGAGGU | 365 | ACCUCGUGGCCUCAGCACA | 975 | 2022 | 1827 | NA |
| AD-27640.1 | CACGAGGUCAGCCCAACCA | 366 | UGGUUGGGCUGACCUCGUG | 976 | 2033 | 1838 | NA |
| AD-27641.1 | ACGAGGUCAGCCCAACCAG | 367 | CUGGUUGGGCUGACCUCGU | 977 | 2034 | 1839 | NA |
| AD-27642.1 | GAGGUCAGCCCAACCAGUG | 368 | CACUGGUUGGGCUGACCUC | 978 | 2036 | 1841 | NA |
| AD-27643.1 | ACAGGGAGGCCAGCAUCCA | 369 | UGGAUGCUGGCCUCCCUGU | 979 | 2063 | 1868 | NA |
| AD-27644.1 | GAGGCCAGCAUCCACGCUU | 370 | AAGCGUGGAUGCUGGCCUC | 980 | 2068 | 1873 | NA |
| AD-27645.1 | AGGCCAGCAUCCACGCUUC | 371 | GAAGCGUGGAUGCUGGCCU | 981 | 2069 | 1874 | NA |
| AD-27646.1 | GCCAGCAUCCACGCUUCCU | 372 | AGGAAGCGUGGAUGCUGGC | 982 | 2071 | 1876 | NA |
| AD-27647.1 | AGCAUCCACGCUUCCUGCU | 373 | AGCAGGAAGCGUGGAUGCU | 983 | 2074 | 1879 | NA |
| AD-27648.1 | GCAUCCACGCUUCCUGCUG | 374 | CAGCAGGAAGCGUGGAUGC | 984 | 2075 | 1880 | NA |
| AD-27649.1 | UCCACGCUUCCUGCUGCCA | 375 | UGGCAGCAGGAAGCGUGGA | 985 | 2078 | 1883 | NA |
| AD-27650.1 | CCACGCUUCCUGCUGCCAU | 376 | AUGGCAGCAGGAAGCGUGG | 986 | 2079 | 1884 | NA |
| AD-27651.1 | CACGCUUCCUGCUGCCAUG | 377 | CAUGGCAGCAGGAAGCGUG | 987 | 2080 | 1885 | NA |
| AD-27652.1 | UUCCUGCUGCCAUGCCCCA | 378 | UGGGGCAUGGCAGCAGGAA | 988 | 2085 | 1890 | 2218 |
| AD-27653.1 | CCAUGCCCCAGGUCUGGAA | 379 | UUCCAGACCUGGGGCAUGG | 989 | 2094 | 1899 | NA |
| AD-27654.1 | CAUGCCCCAGGUCUGGAAU | 380 | AUUCCAGACCUGGGGCAUG | 990 | 2095 | 1900 | NA |
| AD-27655.1 | AUGCCCCAGGUCUGGAAUG | 381 | CAUUCCAGACCUGGGGCAU | 991 | 2096 | 1901 | NA |
| AD-27656.1 | GCCCCAGGUCUGGAAUGCA | 382 | UGCAUUCCAGACCUGGGGC | 992 | 2098 | 1903 | NA |
| AD-27657.1 | CCCCAGGUCUGGAAUGCAA | 383 | UUGCAUUCCAGACCUGGGG | 993 | 2099 | 1904 | NA |
| AD-27658.1 | CCAGGUCUGGAAUGCAAAG | 384 | CUUUGCAUUCCAGACCUGG | 994 | 2101 | 1906 | NA |
| AD-27659.1 | CAGGUCUGGAAUGCAAAGU | 385 | ACUUUGCAUUCCAGACCUG | 995 | 2102 | 1907 | NA |
| AD-27660.1 | AGGUCUGGAAUGCAAAGUC | 386 | GACUUUGCAUUCCAGACCU | 996 | 2103 | 1908 | NA |
| AD-27661.1 | GGUCUGGAAUGCAAAGUCA | 387 | UGACUUUGCAUUCCAGACC | 997 | 2104 | 1909 | NA |
| AD-27662.1 | GUCUGGAAUGCAAAGUCAA | 388 | UUGACUUUGCAUUCCAGAC | 998 | 2105 | 1910 | NA |
| AD-27663.1 | UCUGGAAUGCAAAGUCAAG | 389 | CUUGACUUUGCAUUCCAGA | 999 | 2106 | 1911 | NA |
| AD-27664.1 | UGGAAUGCAAAGUCAAGGA | 390 | UCCUUGACUUUGCAUUCCA | 1000 | 2108 | 1913 | NA |
| AD-27665.1 | GGAAUGCAAAGUCAAGGAG | 391 | CUCCUUGACUUUGCAUUCC | 1001 | 2109 | 1914 | NA |
| AD-27666.1 | AAUGCAAAGUCAAGGAGCA | 392 | UGCUCCUUGACUUUGCAUU | 1002 | 2111 | 1916 | NA |
| AD-27667.1 | AUGCAAAGUCAAGGAGCAU | 393 | AUGCUCCUUGACUUUGCAU | 1003 | 2112 | 1917 | NA |
| AD-27668.1 | UGCAAAGUCAAGGAGCAUG | 394 | CAUGCUCCUUGACUUUGCA | 1004 | 2113 | 1918 | NA |
| AD-27669.1 | CAAAGUCAAGGAGCAUGGA | 395 | UCCAUGCUCCUUGACUUUG | 1005 | 2115 | 1920 | NA |
| AD-27670.1 | AAAGUCAAGGAGCAUGGAA | 396 | UUCCAUGCUCCUUGACUUU | 1006 | 2116 | 1921 | NA |
| AD-27671.1 | AAGUCAAGGAGCAUGGAAU | 397 | AUUCCAUGCUCCUUGACUU | 1007 | 2117 | 1922 | NA |
| AD-27672.1 | AUGGAAUCCCGGCCCCUCA | 398 | UGAGGGGCCGGGAUUCCAU | 1008 | 2129 | 1934 | NA |
| AD-27673.1 | ACAGGCAGCACCAGCGAAG | 399 | CUUCGCUGGUGCUGCCUGU | 1009 | 2281 | 2086 | NA |
| AD-27674.1 | CAGCCGUUGCCAUCUGCUG | 400 | CAGCAGAUGGCAACGGCUG | 1010 | 2309 | 2114 | NA |
| AD-27675.1 | GUUGCCAUCUGCUGCCGGA | 401 | UCCGGCAGCAGAUGGCAAC | 1011 | 2314 | 2119 | NA |
| AD-27676.1 | UUGCCAUCUGCUGCCGGAG | 402 | CUCCGGCAGCAGAUGGCAA | 1012 | 2315 | 2120 | NA |
| AD-27677.1 | CUCCCAGGAGCUCCAGUGA | 403 | UCACUGGAGCUCCUGGGAG | 1013 | 2352 | 2157 | NA |
| AD-27678.1 | UCCCAGGAGCUCCAGUGAC | 404 | GUCACUGGAGCUCCUGGGA | 1014 | 2353 | 2158 | NA |
| AD-27679.1 | CCCAGGAGCUCCAGUGACA | 405 | UGUCACUGGAGCUCCUGGG | 1015 | 2354 | 2159 | NA |
| AD-27680.1 | CCAGGAGCUCCAGUGACAG | 406 | CUGUCACUGGAGCUCCUGG | 1016 | 2355 | 2160 | NA |
| AD-27681.1 | AGCUCCAGUGACAGCCCCA | 407 | UGGGGCUGUCACUGGAGCU | 1017 | 2360 | 2165 | NA |
| AD-27682.1 | GCUCCAGUGACAGCCCCAU | 408 | AUGGGGCUGUCACUGGAGC | 1018 | 2361 | 2166 | NA |
| AD-27683.1 | CUCCAGUGACAGCCCCAUC | 409 | GAUGGGGCUGUCACUGGAG | 1019 | 2362 | 2167 | NA |
| AD-27684.1 | CAGUGACAGCCCCAUCCCA | 410 | UGGGAUGGGGCUGUCACUG | 1020 | 2365 | 2170 | NA |
| AD-27685.1 | AGUGACAGCCCCAUCCCAG | 411 | CUGGGAUGGGGCUGUCACU | 1021 | 2366 | 2171 | NA |
| AD-27686.1 | UGACAGCCCCAUCCCAGGA | 412 | UCCUGGGAUGGGGCUGUCA | 1022 | 2368 | 2173 | NA |
| AD-27687.1 | GACAGCCCCAUCCCAGGAU | 413 | AUCCUGGGAUGGGGCUGUC | 1023 | 2369 | 2174 | NA |
| AD-27688.1 | ACAGCCCCAUCCCAGGAUG | 414 | CAUCCUGGGAUGGGGCUGU | 1024 | 2370 | 2175 | NA |
| AD-27689.1 | GGGCUGGGGCUGAGCUUUA | 415 | UAAAGCUCAGCCCCAGCCC | 1025 | 2408 | 2212 | NA |
| AD-27690.1 | GGCUGGGGCUGAGCUUUAA | 416 | UUAAAGCUCAGCCCCAGCC | 1026 | 2409 | 2213 | NA |
| AD-27691.1 | GCUGGGGCUGAGCUUUAAA | 417 | UUUAAAGCUCAGCCCCAGC | 1027 | 2410 | 2214 | NA |
| AD-27692.1 | GGCUGAGCUUUAAAAUGGU | 418 | ACCAUUUUAAAGCUCAGCC | 1028 | 2415 | 2219 | NA |
| AD-27693.1 | GCUGAGCUUUAAAAUGGUU | 419 | AACCAUUUUAAAGCUCAGC | 1029 | 2416 | 2220 | NA |
| AD-27694.1 | CUGAGCUUUAAAAUGGUUC | 420 | GAACCAUUUUAAAGCUCAG | 1030 | 2417 | 2221 | NA |
| AD-27695.1 | GUGGAGGUGCCAGGAAGCU | 421 | AGCUUCCUGGCACCUCCAC | 1031 | 2577 | 2381 | NA |
| AD-27696.1 | UGGAGGUGCCAGGAAGCUC | 422 | GAGCUUCCUGGCACCUCCA | 1032 | 2578 | 2382 | NA |
| AD-27697.1 | AGGUGCCAGGAAGCUCCCU | 423 | AGGGAGCUUCCUGGCACCU | 1033 | 2581 | 2385 | NA |
| AD-27698.1 | UCACUGUGGGGCAUUUCAC | 424 | GUGAAAUGCCCCACAGUGA | 1034 | 2603 | 2407 | NA |
| AD-27699.1 | ACUGUGGGGCAUUUCACCA | 425 | UGGUGAAAUGCCCCACAGU | 1035 | 2605 | 2409 | NA |
| AD-27700.1 | CUGUGGGGCAUUUCACCAU | 426 | AUGGUGAAAUGCCCCACAG | 1036 | 2606 | 2410 | NA |
| AD-27701.1 | UGUGGGGCAUUUCACCAUU | 427 | AAUGGUGAAAUGCCCCACA | 1037 | 2607 | 2411 | NA |
| AD-27702.1 | UGCUGCCAGCUGCUCCCAA | 428 | UUGGGAGCAGCUGGCAGCA | 1038 | 2650 | 2453 | NA |
| AD-27703.1 | CUUUUAUUGAGCUCUUGUU | 429 | AACAAGAGCUCAAUAAAAG | 1039 | 2695 | 2498 | NA |
| AD-27704.1 | GUCUCCACCAAGGAGGCAG | 430 | CUGCCUCCUUGGUGGAGAC | 1040 | 2738 | 2541 | NA |
| AD-27705.1 | CUCCACCAAGGAGGCAGGA | 431 | UCCUGCCUCCUUGGUGGAG | 1041 | 2740 | 2543 | NA |
| AD-27706.1 | UCCACCAAGGAGGCAGGAU | 432 | AUCCUGCCUCCUUGGUGGA | 1042 | 2741 | 2544 | NA |
| AD-27707.1 | CCACCAAGGAGGCAGGAUU | 433 | AAUCCUGCCUCCUUGGUGG | 1043 | 2742 | 2545 | NA |
| AD-27708.1 | ACCAAGGAGGCAGGAUUCU | 434 | AGAAUCCUGCCUCCUUGGU | 1044 | 2744 | 2547 | NA |
| AD-27709.1 | CCAAGGAGGCAGGAUUCUU | 435 | AAGAAUCCUGCCUCCUUGG | 1045 | 2745 | 2548 | NA |
| AD-27710.1 | CAAGGAGGCAGGAUUCUUC | 436 | GAAGAAUCCUGCCUCCUUG | 1046 | 2746 | 2549 | NA |
| AD-27711.1 | GGAGGCAGGAUUCUUCCCA | 437 | UGGGAAGAAUCCUGCCUCC | 1047 | 2749 | 2552 | NA |
| AD-27712.1 | GAGGCAGGAUUCUUCCCAU | 438 | AUGGGAAGAAUCCUGCCUC | 1048 | 2750 | 2553 | NA |
| AD-27713.1 | AGGCAGGAUUCUUCCCAUG | 439 | CAUGGGAAGAAUCCUGCCU | 1049 | 2751 | 2554 | NA |
| AD-27838.1 | UGCUGAUGGCCCUCAUCUC | 440 | GAGAUGAGGGCCAUCAGCA | 1050 | 2832 | 2634 | NA |
| AD-27839.1 | CUGAUGGCCCUCAUCUCCA | 441 | UGGAGAUGAGGGCCAUCAG | 1051 | 2834 | 2636 | NA |
| AD-27840.1 | UGAUGGCCCUCAUCUCCAG | 442 | CUGGAGAUGAGGGCCAUCA | 1052 | 2835 | 2637 | NA |
| AD-27841.1 | AUGGCCCUCAUCUCCAGCU | 443 | AGCUGGAGAUGAGGGCCAU | 1053 | 2837 | 2639 | NA |
| AD-27842.1 | AGCUUUCUGGAUGGCAUCU | 444 | AGAUGCCAUCCAGAAAGCU | 1054 | 2900 | 2703 | NA |
| AD-27843.1 | GCUUUCUGGAUGGCAUCUA | 445 | UAGAUGCCAUCCAGAAAGC | 1055 | 2901 | 2704 | NA |
| AD-27844.1 | CUUUCUGGAUGGCAUCUAG | 446 | CUAGAUGCCAUCCAGAAAG | 1056 | 2902 | 2705 | NA |
| AD-27845.1 | CUGGAUGGCAUCUAGCCAG | 447 | CUGGCUAGAUGCCAUCCAG | 1057 | 2906 | 2709 | NA |
| AD-27846.1 | UGGAUGGCAUCUAGCCAGA | 448 | UCUGGCUAGAUGCCAUCCA | 1058 | 2907 | 2710 | NA |
| AD-27847.1 | GGAUGGCAUCUAGCCAGAG | 449 | CUCUGGCUAGAUGCCAUCC | 1059 | 2908 | 2711 | NA |
| AD-27848.1 | UGGCAUCUAGCCAGAGGCU | 450 | AGCCUCUGGCUAGAUGCCA | 1060 | 2911 | 2714 | NA |
| AD-27849.1 | GGCAUCUAGCCAGAGGCUG | 451 | CAGCCUCUGGCUAGAUGCC | 1061 | 2912 | 2715 | NA |
| AD-27850.1 | CAUCUAGCCAGAGGCUGGA | 452 | UCCAGCCUCUGGCUAGAUG | 1062 | 2914 | 2717 | NA |
| AD-27851.1 | UCUAGCCAGAGGCUGGAGA | 453 | UCUCCAGCCUCUGGCUAGA | 1063 | 2916 | 2719 | NA |
| AD-27852.1 | CUCUAUGCCAGGCUGUGCU | 454 | AGCACAGCCUGGCAUAGAG | 1064 | 2994 | 2797 | NA |
| AD-27853.1 | UCUAUGCCAGGCUGUGCUA | 455 | UAGCACAGCCUGGCAUAGA | 1065 | 2995 | 2798 | NA |
| AD-27854.1 | UCUCAGCCAACCCGCUCCA | 456 | UGGAGCGGGUUGGCUGAGA | 1066 | 3088 | 2891 | NA |
| AD-27855.1 | UCAGCCAACCCGCUCCACU | 457 | AGUGGAGCGGGUUGGCUGA | 1067 | 3090 | 2893 | NA |
| AD-27856.1 | CAGCCAACCCGCUCCACUA | 458 | UAGUGGAGCGGGUUGGCUG | 1068 | 3091 | 2894 | NA |
| AD-27857.1 | AGCCAACCCGCUCCACUAC | 459 | GUAGUGGAGCGGGUUGGCU | 1069 | 3092 | 2895 | NA |
| AD-27858.1 | UGCCUGCCAAGCUCACACA | 460 | UGUGUGAGCUUGGCAGGCA | 1070 | 3174 | 2977 | NA |
| AD-27859.1 | GCCUGCCAAGCUCACACAG | 461 | CUGUGUGAGCUUGGCAGGC | 1071 | 3175 | 2978 | NA |
| AD-27860.1 | CUGCCAAGCUCACACAGCA | 462 | UGCUGUGUGAGCUUGGCAG | 1072 | 3177 | 2980 | NA |
| AD-27861.1 | UGCCAAGCUCACACAGCAG | 463 | CUGCUGUGUGAGCUUGGCA | 1073 | 3178 | 2981 | NA |
| AD-27862.1 | CCAAGCUCACACAGCAGGA | 464 | UCCUGCUGUGUGAGCUUGG | 1074 | 3180 | 2983 | NA |
| AD-27863.1 | CAAGCUCACACAGCAGGAA | 465 | UUCCUGCUGUGUGAGCUUG | 1075 | 3181 | 2984 | NA |
| AD-27864.1 | AAGCUCACACAGCAGGAAC | 466 | GUUCCUGCUGUGUGAGCUU | 1076 | 3182 | 2985 | NA |
| AD-27865.1 | AGCUCACACAGCAGGAACU | 467 | AGUUCCUGCUGUGUGAGCU | 1077 | 3183 | 2986 | NA |
| AD-27866.1 | GCUCACACAGCAGGAACUG | 468 | CAGUUCCUGCUGUGUGAGC | 1078 | 3184 | 2987 | NA |
| AD-27867.1 | CUCACACAGCAGGAACUGA | 469 | UCAGUUCCUGCUGUGUGAG | 1079 | 3185 | 2988 | NA |
| AD-27868.1 | UCACACAGCAGGAACUGAG | 470 | CUCAGUUCCUGCUGUGUGA | 1080 | 3186 | 2989 | NA |
| AD-27869.1 | CACAGCAGGAACUGAGCCA | 471 | UGGCUCAGUUCCUGCUGUG | 1081 | 3189 | 2992 | NA |
| AD-27870.1 | ACAGCAGGAACUGAGCCAG | 472 | CUGGCUCAGUUCCUGCUGU | 1082 | 3190 | 2993 | NA |
| AD-27871.1 | CAGCAGGAACUGAGCCAGA | 473 | UCUGGCUCAGUUCCUGCUG | 1083 | 3191 | 2994 | NA |
| AD-27872.1 | AGCAGGAACUGAGCCAGAA | 474 | UUCUGGCUCAGUUCCUGCU | 1084 | 3192 | 2995 | NA |
| AD-27873.1 | GCAGGAACUGAGCCAGAAA | 475 | UUUCUGGCUCAGUUCCUGC | 1085 | 3193 | 2996 | NA |
| AD-27874.1 | CAGGAACUGAGCCAGAAAC | 476 | GUUUCUGGCUCAGUUCCUG | 1086 | 3194 | 2997 | NA |
| AD-27875.1 | CUCUGAAGCCAAGCCUCUU | 477 | AAGAGGCUUGGCUUCAGAG | 1087 | 3227 | 3030 | NA |
| AD-27876.1 | UCUGAAGCCAAGCCUCUUC | 478 | GAAGAGGCUUGGCUUCAGA | 1088 | 3228 | 3031 | NA |
| AD-27877.1 | CUGAAGCCAAGCCUCUUCU | 479 | AGAAGAGGCUUGGCUUCAG | 1089 | 3229 | 3032 | NA |
| AD-27878.1 | UGAAGCCAAGCCUCUUCUU | 480 | AAGAAGAGGCUUGGCUUCA | 1090 | 3230 | 3033 | NA |
| AD-27879.1 | GAAGCCAAGCCUCUUCUUA | 481 | UAAGAAGAGGCUUGGCUUC | 1091 | 3231 | 3034 | NA |
| AD-27880.1 | AAGCCAAGCCUCUUCUUAC | 482 | GUAAGAAGAGGCUUGGCUU | 1092 | 3232 | 3035 | NA |
| AD-27881.1 | GCCAAGCCUCUUCUUACUU | 483 | AAGUAAGAAGAGGCUUGGC | 1093 | 3234 | 3037 | NA |
| AD-27882.1 | GGUAACAGUGAGGCUGGGA | 484 | UCCCAGCCUCACUGUUACC | 1094 | 3280 | 3065 | NA |
| AD-27883.1 | GUAACAGUGAGGCUGGGAA | 485 | UUCCCAGCCUCACUGUUAC | 1095 | 3281 | 3066 | NA |
| AD-27884.1 | UAACAGUGAGGCUGGGAAG | 486 | CUUCCCAGCCUCACUGUUA | 1096 | 3282 | 3067 | NA |
| AD-27885.1 | AGUGAGGCUGGGAAGGGGA | 487 | UCCCCUUCCCAGCCUCACU | 1097 | 3286 | 3071 | NA |
| AD-27886.1 | GUGAGGCUGGGAAGGGGAA | 488 | UUCCCCUUCCCAGCCUCAC | 1098 | 3287 | 3072 | NA |
| AD-27887.1 | UGAGGCUGGGAAGGGGAAC | 489 | GUUCCCCUUCCCAGCCUCA | 1099 | 3288 | 3073 | NA |
| AD-27888.1 | GAGGCUGGGAAGGGGAACA | 490 | UGUUCCCCUUCCCAGCCUC | 1100 | 3289 | 3074 | NA |
| AD-27889.1 | AGGCUGGGAAGGGGAACAC | 491 | GUGUUCCCCUUCCCAGCCU | 1101 | 3290 | 3075 | NA |
| AD-27890.1 | GGCUGGGAAGGGGAACACA | 492 | UGUGUUCCCCUUCCCAGCC | 1102 | 3291 | 3076 | NA |
| AD-27891.1 | GCUGGGAAGGGGAACACAG | 493 | CUGUGUUCCCCUUCCCAGC | 1103 | 3292 | 3077 | NA |
| AD-27892.1 | CUGGGAAGGGGAACACAGA | 494 | UCUGUGUUCCCCUUCCCAG | 1104 | 3293 | 3078 | NA |
| AD-27893.1 | UGGGAAGGGGAACACAGAC | 495 | GUCUGUGUUCCCCUUCCCA | 1105 | 3294 | 3079 | NA |
| AD-27894.1 | GGAAGGGGAACACAGACCA | 496 | UGGUCUGUGUUCCCCUUCC | 1106 | 3296 | 3081 | NA |
| AD-27895.1 | GAAGGGGAACACAGACCAG | 497 | CUGGUCUGUGUUCCCCUUC | 1107 | 3297 | 3082 | NA |
| AD-27896.1 | AGGGGAACACAGACCAGGA | 498 | UCCUGGUCUGUGUUCCCCU | 1108 | 3299 | 3084 | NA |
| AD-27897.1 | GGGGAACACAGACCAGGAA | 499 | UUCCUGGUCUGUGUUCCCC | 1109 | 3300 | 3085 | NA |
| AD-27898.1 | GGGAACACAGACCAGGAAG | 500 | CUUCCUGGUCUGUGUUCCC | 1110 | 3301 | 3086 | NA |
| AD-27899.1 | GAACACAGACCAGGAAGCU | 501 | AGCUUCCUGGUCUGUGUUC | 1111 | 3303 | 3088 | NA |
| AD-27900.1 | AACACAGACCAGGAAGCUC | 502 | GAGCUUCCUGGUCUGUGUU | 1112 | 3304 | 3089 | NA |
| AD-27901.1 | ACAACUGUCCCUCCUUGAG | 503 | CUCAAGGAGGGACAGUUGU | 1113 | 3437 | 3213 | NA |
| AD-27902.1 | AACUGUCCCUCCUUGAGCA | 504 | UGCUCAAGGAGGGACAGUU | 1114 | 3439 | 3215 | NA |
| AD-27903.1 | UGUCCCUCCUUGAGCACCA | 505 | UGGUGCUCAAGGAGGGACA | 1115 | 3442 | 3218 | NA |
| AD-27904.1 | GUCCCUCCUUGAGCACCAG | 506 | CUGGUGCUCAAGGAGGGAC | 1116 | 3443 | 3219 | NA |
| AD-27905.1 | UCCUUGAGCACCAGCCCCA | 507 | UGGGGCUGGUGCUCAAGGA | 1117 | 3448 | 3224 | NA |
| AD-27906.1 | ACCAGCCCCACCCAAGCAA | 508 | UUGCUUGGGUGGGGCUGGU | 1118 | 3457 | 3233 | NA |
| AD-27907.1 | AGCCCCACCCAAGCAAGCA | 509 | UGCUUGCUUGGGUGGGGCU | 1119 | 3460 | 3236 | NA |
| AD-27908.1 | CCCCACCCAAGCAAGCAGA | 510 | UCUGCUUGCUUGGGUGGGG | 1120 | 3462 | 3238 | NA |
| AD-27909.1 | CCCACCCAAGCAAGCAGAC | 511 | GUCUGCUUGCUUGGGUGGG | 1121 | 3463 | 3239 | NA |
| AD-27910.1 | CCACCCAAGCAAGCAGACA | 512 | UGUCUGCUUGCUUGGGUGG | 1122 | 3464 | 3240 | NA |
| AD-27911.1 | CACCCAAGCAAGCAGACAU | 513 | AUGUCUGCUUGCUUGGGUG | 1123 | 3465 | 3241 | NA |
| AD-27912.1 | ACCCAAGCAAGCAGACAUU | 514 | AAUGUCUGCUUGCUUGGGU | 1124 | 3466 | 3242 | NA |
| AD-27913.1 | CCCAAGCAAGCAGACAUUU | 515 | AAAUGUCUGCUUGCUUGGG | 1125 | 3467 | 3243 | NA |
| AD-27914.1 | CCAAGCAAGCAGACAUUUA | 516 | UAAAUGUCUGCUUGCUUGG | 1126 | 3468 | 3244 | NA |
| AD-27915.1 | CAAGCAAGCAGACAUUUAU | 517 | AUAAAUGUCUGCUUGCUUG | 1127 | 3469 | 3245 | NA |
| AD-27916.1 | AAGCAAGCAGACAUUUAUC | 518 | GAUAAAUGUCUGCUUGCUU | 1128 | 3470 | 3246 | NA |
| AD-27917.1 | AGCAAGCAGACAUUUAUCU | 519 | AGAUAAAUGUCUGCUUGCU | 1129 | 3471 | 3247 | NA |
| AD-27918.1 | GCAAGCAGACAUUUAUCUU | 520 | AAGAUAAAUGUCUGCUUGC | 1130 | 3472 | 3248 | NA |
| AD-27919.1 | CAAGCAGACAUUUAUCUUU | 521 | AAAGAUAAAUGUCUGCUUG | 1131 | 3473 | 3249 | NA |
| AD-27920.1 | AAGCAGACAUUUAUCUUUU | 522 | AAAAGAUAAAUGUCUGCUU | 1132 | 3474 | 3250 | NA |
| AD-27921.1 | AGCAGACAUUUAUCUUUUG | 523 | CAAAAGAUAAAUGUCUGCU | 1133 | 3475 | 3251 | NA |
| AD-27922.1 | AGACAUUUAUCUUUUGGGU | 524 | ACCCAAAAGAUAAAUGUCU | 1134 | 3478 | 3254 | NA |
| AD-27923.1 | GACAUUUAUCUUUUGGGUC | 525 | GACCCAAAAGAUAAAUGUC | 1135 | 3479 | 3255 | NA |
| AD-27924.1 | AUCUUUUGGGUCUGUCCUC | 526 | GAGGACAGACCCAAAAGAU | 1136 | 3486 | 3262 | NA |
| AD-27925.1 | UCUUUUGGGUCUGUCCUCU | 527 | AGAGGACAGACCCAAAAGA | 1137 | 3487 | 3263 | NA |
| AD-27926.1 | CUUUUGGGUCUGUCCUCUC | 528 | GAGAGGACAGACCCAAAAG | 1138 | 3488 | 3264 | NA |
| AD-27927.1 | UUUUGGGUCUGUCCUCUCU | 529 | AGAGAGGACAGACCCAAAA | 1139 | 3489 | 3265 | NA |
| AD-27928.1 | UUUGGGUCUGUCCUCUCUG | 530 | CAGAGAGGACAGACCCAAA | 1140 | 3490 | 3266 | NA |
| AD-27929.1 | UUGGGUCUGUCCUCUCUGU | 531 | ACAGAGAGGACAGACCCAA | 1141 | 3491 | 3267 | NA |
| AD-27930.1 | UGGGUCUGUCCUCUCUGUU | 532 | AACAGAGAGGACAGACCCA | 1142 | 3492 | 3268 | NA |
| AD-28045.1 | GGGUCUGUCCUCUCUGUUG | 533 | CAACAGAGAGGACAGACCC | 1143 | 3493 | 3269 | NA |
| AD-28046.1 | UCUGUCCUCUCUGUUGCCU | 534 | AGGCAACAGAGAGGACAGA | 1144 | 3496 | 3272 | NA |
| AD-28047.1 | CUGUCCUCUCUGUUGCCUU | 535 | AAGGCAACAGAGAGGACAG | 1145 | 3497 | 3273 | NA |
| AD-28048.1 | UGUCCUCUCUGUUGCCUUU | 536 | AAAGGCAACAGAGAGGACA | 1146 | 3498 | 3274 | NA |
| AD-28049.1 | GUCCUCUCUGUUGCCUUUU | 537 | AAAAGGCAACAGAGAGGAC | 1147 | 3499 | 3275 | NA |
| AD-28050.1 | AAGAUAUUUAUUCUGGGUU | 538 | AACCCAGAAUAAAUAUCUU | 1148 | 3559 | NA | NA |
| AD-28051.1 | AGAUAUUUAUUCUGGGUUU | 539 | AAACCCAGAAUAAAUAUCU | 1149 | 3560 | NA | NA |
| AD-28052.1 | GAUAUUUAUUCUGGGUUUU | 540 | AAAACCCAGAAUAAAUAUC | 1150 | 3561 | NA | NA |
| AD-28053.1 | CUGGCACCUACGUGGUGGU | 541 | ACCACCACGUAGGUGCCAG | 1151 | 515 | NA | NA |
| AD-28054.1 | CUACAGGCAGCACCAGCGA | 542 | UCGCUGGUGCUGCCUGUAG | 1152 | 2279 | NA | NA |
| AD-28055.1 | CAGGUGGAGGUGCCAGGAA | 543 | UUCCUGGCACCUCCACCUG | 1153 | 2574 | NA | NA |
| AD-28056.1 | CUCACUGUGGGGCAUUUCA | 544 | UGAAAUGCCCCACAGUGAG | 1154 | 2602 | NA | NA |
| AD-28057.1 | CGUGCCUGCCAAGCUCACA | 545 | UGUGAGCUUGGCAGGCACG | 1155 | 3172 | NA | NA |
| AD-28058.1 | CCAAGGGAAGGGCACGGUU | 546 | AACCGUGCCCUUCCCUUGG | 1156 | 1056 | NA | NA |
| AD-28059.1 | CUCUAGACCUGUUUUGCUU | 547 | AAGCAAAACAGGUCUAGAG | 1157 | NA | NA | NA |
| AD-28060.1 | CCCUAGACCUGUUUUGCUU | 548 | AAGCAAAACAGGUCUAGGG | 1158 | NA | NA | NA |
| AD-28061.1 | GGUUGGCAGCUGUUUUGCA | 549 | UGCAAAACAGCUGCCAACC | 1159 | 1645 | 1450 | NA |
| AD-28062.1 | GUUGGCAGCUGUUUUGCAG | 550 | CUGCAAAACAGCUGCCAAC | 1160 | 1646 | 1451 | NA |
| AD-28063.1 | UGGCAGCUGUUUUGCAGGA | 551 | UCCUGCAAAACAGCUGCCA | 1161 | 1648 | 1453 | NA |
| AD-28064.1 | GGCAGCUGUUUUGCAGGAC | 552 | GUCCUGCAAAACAGCUGCC | 1162 | 1649 | 1454 | NA |
| AD-28065.1 | GCAGCUGUUUUGCAGGACU | 553 | AGUCCUGCAAAACAGCUGC | 1163 | 1650 | 1455 | NA |
| AD-28066.1 | CCUACACGGAUGGCCACAG | 554 | CUGUGGCCAUCCGUGUAGG | 1164 | 1690 | 1495 | NA |
| AD-28067.1 | GAUGAGGAGCUGCUGAGCU | 555 | AGCUCAGCAGCUCCUCAUC | 1165 | 1729 | 1534 | NA |
| AD-28068.1 | GCUGCUGAGCUGCUCCAGU | 556 | ACUGGAGCAGCUCAGCAGC | 1166 | 1737 | 1542 | NA |
| AD-28069.1 | UGCUGAGCUGCUCCAGUUU | 557 | AAACUGGAGCAGCUCAGCA | 1167 | 1739 | 1544 | NA |
| AD-28070.1 | GCUGAGCUGCUCCAGUUUC | 558 | GAAACUGGAGCAGCUCAGC | 1168 | 1740 | 1545 | NA |
| AD-28071.1 | CUGAGCUGCUCCAGUUUCU | 559 | AGAAACUGGAGCAGCUCAG | 1169 | 1741 | 1546 | NA |
| AD-28072.1 | AGCUGCUCCAGUUUCUCCA | 560 | UGGAGAAACUGGAGCAGCU | 1170 | 1744 | 1549 | NA |
| AD-28073.1 | GCUGCUCCAGUUUCUCCAG | 561 | CUGGAGAAACUGGAGCAGC | 1171 | 1745 | 1550 | NA |
| AD-28074.1 | UGCUCCAGUUUCUCCAGGA | 562 | UCCUGGAGAAACUGGAGCA | 1172 | 1747 | 1552 | NA |
| AD-28075.1 | CUCCAGUUUCUCCAGGAGU | 563 | ACUCCUGGAGAAACUGGAG | 1173 | 1749 | 1554 | NA |
| AD-28076.1 | AGUUUCUCCAGGAGUGGGA | 564 | UCCCACUCCUGGAGAAACU | 1174 | 1753 | 1558 | NA |
| AD-28077.1 | UUUCUCCAGGAGUGGGAAG | 565 | CUUCCCACUCCUGGAGAAA | 1175 | 1755 | 1560 | NA |
| AD-28078.1 | GGUGUCUACGCCAUUGCCA | 566 | UGGCAAUGGCGUAGACACC | 1176 | 1846 | 1651 | NA |
| AD-28079.1 | GUGUCUACGCCAUUGCCAG | 567 | CUGGCAAUGGCGUAGACAC | 1177 | 1847 | 1652 | NA |
| AD-28080.1 | GUCUACGCCAUUGCCAGGU | 568 | ACCUGGCAAUGGCGUAGAC | 1178 | 1849 | 1654 | NA |
| AD-28081.1 | UCUACGCCAUUGCCAGGUG | 569 | CACCUGGCAAUGGCGUAGA | 1179 | 1850 | 1655 | NA |
| AD-28082.1 | ACGCCAUUGCCAGGUGCUG | 570 | CAGCACCUGGCAAUGGCGU | 1180 | 1853 | 1658 | NA |
| AD-28083.1 | CAUUGCCAGGUGCUGCCUG | 571 | CAGGCAGCACCUGGCAAUG | 1181 | 1857 | 1662 | NA |
| AD-28084.1 | CAACUGCAGCGUCCACACA | 572 | UGUGUGGACGCUGCAGUUG | 1182 | 1887 | 1692 | NA |
| AD-28085.1 | AACUGCAGCGUCCACACAG | 573 | CUGUGUGGACGCUGCAGUU | 1183 | 1888 | 1693 | NA |
| AD-28086.1 | CUGCAGCGUCCACACAGCU | 574 | AGCUGUGUGGACGCUGCAG | 1184 | 1890 | 1695 | NA |
| AD-28087.1 | UGCAGCGUCCACACAGCUC | 575 | GAGCUGUGUGGACGCUGCA | 1185 | 1891 | 1696 | NA |
| AD-28088.1 | CAGCGUCCACACAGCUCCA | 576 | UGGAGCUGUGUGGACGCUG | 1186 | 1893 | 1698 | NA |
| AD-28089.1 | AGCGUCCACACAGCUCCAC | 577 | GUGGAGCUGUGUGGACGCU | 1187 | 1894 | 1699 | NA |
| AD-28090.1 | CGUCCACACAGCUCCACCA | 578 | UGGUGGAGCUGUGUGGACG | 1188 | 1896 | 1701 | NA |
| AD-28091.1 | GUCCACACAGCUCCACCAG | 579 | CUGGUGGAGCUGUGUGGAC | 1189 | 1897 | 1702 | NA |
| AD-28092.1 | CCACACAGCUCCACCAGCU | 580 | AGCUGGUGGAGCUGUGUGG | 1190 | 1899 | 1704 | NA |
| AD-28093.1 | CCCAGGUCUGGAAUGCAAA | 581 | UUUGCAUUCCAGACCUGGG | 1191 | 2100 | 1905 | NA |
| AD-28094.1 | CAGGUUGGCAGCUGUUUUG | 582 | CAAAACAGCUGCCAACCUG | 1192 | 1643 | 1448 | NA |
| AD-28095.1 | CAGCUGUUUUGCAGGACUG | 583 | CAGUCCUGCAAAACAGCUG | 1193 | 1651 | 1456 | NA |
| AD-28096.1 | AGCUGUUUUGCAGGACUGU | 584 | ACAGUCCUGCAAAACAGCU | 1194 | 1652 | 1457 | NA |
| AD-28097.1 | AUGAGGAGCUGCUGAGCUG | 585 | CAGCUCAGCAGCUCCUCAU | 1195 | 1730 | 1535 | NA |
| AD-28098.1 | CUGCUGAGCUGCUCCAGUU | 586 | AACUGGAGCAGCUCAGCAG | 1196 | 1738 | 1543 | NA |
| AD-28099.1 | UGAGCUGCUCCAGUUUCUC | 587 | GAGAAACUGGAGCAGCUCA | 1197 | 1742 | 1547 | NA |
| AD-28100.1 | GCUCCAGUUUCUCCAGGAG | 588 | CUCCUGGAGAAACUGGAGC | 1198 | 1748 | 1553 | NA |
| AD-28101.1 | UCCAGUUUCUCCAGGAGUG | 589 | CACUCCUGGAGAAACUGGA | 1199 | 1750 | 1555 | NA |
| AD-28102.1 | GUUUCUCCAGGAGUGGGAA | 590 | UUCCCACUCCUGGAGAAAC | 1200 | 1754 | 1559 | NA |
| AD-28103.1 | CGGGCCCACAACGCUUUUG | 591 | CAAAAGCGUUGUGGGCCCG | 1201 | 1819 | 1624 | NA |
| AD-28104.1 | GUGAGGGUGUCUACGCCAU | 592 | AUGGCGUAGACACCCUCAC | 1202 | 1841 | 1646 | NA |
| AD-28105.1 | UGAGGGUGUCUACGCCAUU | 593 | AAUGGCGUAGACACCCUCA | 1203 | 1842 | 1647 | NA |
| AD-28106.1 | UACGCCAUUGCCAGGUGCU | 594 | AGCACCUGGCAAUGGCGUA | 1204 | 1852 | 1657 | NA |
| AD-28107.1 | CCAUUGCCAGGUGCUGCCU | 595 | AGGCAGCACCUGGCAAUGG | 1205 | 1856 | 1661 | NA |
| AD-28108.1 | UUGCCAGGUGCUGCCUGCU | 596 | AGCAGGCAGCACCUGGCAA | 1206 | 1859 | 1664 | NA |
| AD-28109.1 | UGCCAGGUGCUGCCUGCUA | 597 | UAGCAGGCAGCACCUGGCA | 1207 | 1860 | 1665 | NA |
| AD-28110.1 | UUUUAUUGAGCUCUUGUUC | 598 | GAACAAGAGCUCAAUAAAA | 1208 | 2696 | 2499 | NA |
| AD-28111.1 | UUCUAGACCUGUUUUGCUU | 599 | AAGCAAAACAGGUCUAGAA | 1209 | 3530 | 3306 | NA |
| AD-28112.1 | UUCUAGACCUGUUUUGCUU | 600 | GAGCAAAACAGGUCUAGAA | 1210 | 3530 | 3306 | NA |
| AD-28113.1 | UUCUAGACCUGUUUUGCUU | 601 | AGGCAAAACAGGUCUAGAA | 1211 | 3530 | 3306 | NA |
| AD-28114.1 | UUCUAGACCUGUUUUGCUU | 602 | AAGUAAAACAGGUCUAGAA | 1212 | 3530 | 3306 | NA |
| AD-28115.1 | UUCUAGACCUGUUUUGCUU | 603 | AAGCAAAAUAGGUCUAGAA | 1213 | 3530 | 3306 | NA |
| AD-28116.1 | UUCUAGACCUGUUUUGCUU | 604 | AAGCAAAACAGGUUUAGAA | 1214 | 3530 | 3306 | NA |
| AD-28117.1 | UUCUAGACCUGUUUUGCUU | 605 | UUCUAGACCUGUUUUGCUU | 1215 | 3530 | 3306 | NA |
| AD-2S118.1 | CUCUAGACCxGUUUUGCUU | 606 | AAGCAAAACAGGUCUAGAA | 1216 | 3530 | 3306 | NA |
| AD-28119.1 | UUCUAGACCUGUUUUGCUA | 607 | AAGCAAAACAGGUCUAGAA | 1217 | 3530 | 3306 | NA |
| AD-28120.1 | UUCUAGACCAGUUUUGCUA | 608 | AAGCAAAACAGGUCUAGAA | 1218 | 3530 | 3306 | NA |
| AD-28121.1 | UUCUAGACCxGUUUUGCUA | 609 | AAGCAAAACAGGUCUAGAA | 1219 | 3530 | 3306 | NA |
| AD-28122.1 | GUCUAGACCxGUUUUGCUA | 610 | AAGCAAAACAGGUCUAGAA | 1220 | 3530 | 3306 | NA |

TABLE 10
Endolight chemically modified PCSK9 siRNAs

| Duplex | SEQ ID NO | Sense strand 5′ to 3′ | SEQ ID NO | Antisense strand 5′ to 3′ |
|---|---|---|---|---|
| AD-27043.1 | 1221 | AcuAcAucGAGGAGGAcucdTsdT | 1831 | GAGUCCUCCUCGAUGuAGUdTsdT |
| AD-27044.1 | 1222 | uAcAucGAGGAGGAcuccudTsdT | 1832 | AGGAGUCCUCCUCGAUGuAdTsdT |
| AD-27045.1 | 1223 | AcAucGAGGAGGAcuccucdTsdT | 1833 | GAGGAGUCCUCCUCGAUGUdTsdT |
| AD-27046.1 | 1224 | cAucGAGGAGGAcuccucudTsdT | 1834 | AGAGGAGUCCUCCUCGAUGdTsdT |
| AD-27047.1 | 1225 | ucGAGGAGGAcuccucuGudTsdT | 1835 | AcAGAGGAGUCCUCCUCGAdTsdT |
| AD-27048.1 | 1226 | cGAGGAGGAcuccucuGucdTsdT | 1836 | GAcAGAGGAGUCCUCCUCGdTsdT |
| AD-27049.1 | 1227 | GAGGAGGAcuccucuGucudTsdT | 1837 | AGAcAGAGGAGUCCUCCUCdTsdT |
| AD-27050.1 | 1228 | AGGAGGAcuccucuGucuudTsdT | 1838 | AAGAcAGAGGAGUCCUCCUdTsdT |
| AD-27051.1 | 1229 | GcAGccuGGuGGAGGuGuAdTsdT | 1839 | uAcACCUCcACcAGGCUGCdTsdT |
| AD-27052.1 | 1230 | cAGccuGGuGGAGGuGuAudTsdT | 1840 | AuAcACCUCcACcAGGCUGdTsdT |
| AD-27053.1 | 1231 | AGccuGGuGGAGGuGuAucdTsdT | 1841 | GAuAcACCUCcACcAGGCUdTsdT |
| AD-27054.1 | 1232 | GccuGGuGGAGGuGuAucudTsdT | 1842 | AGAuAcACCUCcACcAGGCdTsdT |
| AD-27055.1 | 1233 | GuGGAGGuGuAucuccuAGdTsdT | 1843 | CuAGGAGAuAcACCUCcACdTsdT |
| AD-27056.1 | 1234 | uGGAGGuGuAucuccuAGAdTsdT | 1844 | UCuAGGAGAuAcACCUCcAdTsdT |
| AD-27057.1 | 1235 | GAGGuGuAucuccuAGAcAdTsdT | 1845 | UGUCuAGGAGAuAcACCUCdTsdT |
| AD-27058.1 | 1236 | GuGuAucuccuAGAcAccAdTsdT | 1846 | UGGUGUCuAGGAGAuAcACdTsdT |
| AD-27059.1 | 1237 | uAucuccuAGAcAccAGcAdTsdT | 1847 | UGCUGGUGUCuAGGAGAuAdTsdT |
| AD-27060.1 | 1238 | AucuccuAGAcAccAGcAudTsdT | 1848 | AUGCUGGUGUCuAGGAGAUdTsdT |
| AD-27061.1 | 1239 | cuAGAcAccAGcAuAcAGAdTsdT | 1849 | UCUGuAUGCUGGUGUCuAGdTsdT |
| AD-27062.1 | 1240 | uAGAcAccAGcAuAcAGAGdTsdT | 1850 | CUCUGuAUGCUGGUGUCuAdTsdT |
| AD-27063.1 | 1241 | AGAcAccAGcAuAcAGAGudTsdT | 1851 | ACUCUGuAUGCUGGUGUCUdTsdT |
| AD-27064.1 | 1242 | AcAccAGcAuAcAGAGuGAdTsdT | 1852 | UcACUCUGuAUGCUGGUGUdTsdT |
| AD-27065.1 | 1243 | cAccAGcAuAcAGAGuGAcdTsdT | 1853 | GUcACUCUGuAUGCUGGUGdTsdT |
| AD-27066.1 | 1244 | ccAGcAuAcAGAGuGAccAdTsdT | 1854 | UGGUcACUCUGuAUGCUGGdTsdT |
| AD-27067.1 | 1245 | cAGcAuAcAGAGuGAccAcdTsdT | 1855 | GUGGUcACUCUGuAUGCUGdTsdT |
| AD-27068.1 | 1246 | uAcAGAGuGAccAccGGGAdTsdT | 1856 | UCCCGGUGGUcACUCUGuAdTsdT |
| AD-27069.1 | 1247 | AcAGAGuGAccAccGGGAAdTsdT | 1857 | UUCCCGGUGGUcACUCUGUdTsdT |
| AD-27070.1 | 1248 | cAGAGuGAccAccGGGAAAdTsdT | 1858 | UUUCCCGGUGGUcACUCUGdTsdT |
| AD-27071.1 | 1249 | uGAccAccGGGAAAucGAGdTsdT | 1859 | CUCGAUUUCCCGGUGGUcAdTsdT |
| AD-27072.1 | 1250 | cAccGGGAAAucGAGGGcAdTsdT | 1860 | UGCCCUCGAUUUCCCGGUGdTsdT |
| AD-27073.1 | 1251 | AccGGGAAAucGAGGGcAGdTsdT | 1861 | CUGCCCUCGAUUUCCCGGUdTsdT |
| AD-27074.1 | 1252 | GGGAAAucGAGGGcAGGGudTsdT | 1862 | ACCCUGCCCUCGAUUUCCCdTsdT |
| AD-27075.1 | 1253 | GGAAAucGAGGGcAGGGucdTsdT | 1863 | GACCCUGCCCUCGAUUUCCdTsdT |
| AD-27076.1 | 1254 | GAAAucGAGGGcAGGGucAdTsdT | 1864 | UGACCCUGCCCUCGAUUUCdTsdT |
| AD-27077.1 | 1255 | AAucGAGGGcAGGGucAuGdTsdT | 1865 | cAUGACCCUGCCCUCGAUUdTsdT |
| AD-27078.1 | 1256 | ucGAGGGcAGGGucAuGGudTsdT | 1866 | ACcAUGACCCUGCCCUCGAdTsdT |
| AD-27079.1 | 1257 | AGGGcAGGGucAuGGucAcdTsdT | 1867 | GUGACcAUGACCCUGCCCUdTsdT |
| AD-27080.1 | 1258 | GcAGGGucAuGGucAccGAdTsdT | 1868 | UCGGUGACcAUGACCCUGCdTsdT |
| AD-27081.1 | 1259 | GGGucAuGGucAccGAcuudTsdT | 1869 | AAGUCGGUGACcAUGACCCdTsdT |
| AD-27082.1 | 1260 | GGucAuGGucAccGAcuucdTsdT | 1870 | GAAGUCGGUGACcAUGACCdTsdT |
| AD-27083.1 | 1261 | ucAuGGucAccGAcuucGAdTsdT | 1871 | UCGAAGUCGGUGACcAUGAdTsdT |
| AD-27084.1 | 1262 | cAuGGucAccGAcuucGAGdTsdT | 1872 | CUCGAAGUCGGUGACcAUGdTsdT |
| AD-27085.1 | 1263 | GGAcccGcuuccAcAGAcAdTsdT | 1873 | UGUCUGUGGAAGCGGGUCCdTsdT |
| AD-27086.1 | 1264 | GAcccGcuuccAcAGAcAGdTsdT | 1874 | CUGUCUGUGGAAGCGGGUCdTsdT |
| AD-27087.1 | 1265 | cGcuuccAcAGAcAGGccAdTsdT | 1875 | UGGCCUGUCUGUGGAAGCGdTsdT |
| AD-27088.1 | 1266 | GcuuccAcAGAcAGGccAGdTsdT | 1876 | CUGGCCUGUCUGUGGAAGCdTsdT |
| AD-27089.1 | 1267 | uuccAcAGAcAGGccAGcAdTsdT | 1877 | UGCUGGCCUGUCUGUGGAAdTsdT |
| AD-27090.1 | 1268 | uccAcAGAcAGGccAGcAAdTsdT | 1878 | UUGCUGGCCUGUCUGUGGAdTsdT |
| AD-27091.1 | 1269 | ccAcAGAcAGGccAGcAAGdTsdT | 1879 | CUUGCUGGCCUGUCUGUGGdTsdT |
| AD-27092.1 | 1270 | cAcAGAcAGGccAGcAAGudTsdT | 1880 | ACUUGCUGGCCUGUCUGUGdTsdT |
| AD-27093.1 | 1271 | AcAGAcAGGccAGcAAGuGdTsdT | 1881 | cACUUGCUGGCCUGUCUGUdTsdT |
| AD-27094.1 | 1272 | cAGAcAGGccAGcAAGuGudTsdT | 1882 | AcACUUGCUGGCCUGUCUGdTsdT |
| AD-27095.1 | 1273 | AGAcAGGccAGcAAGuGuGdTsdT | 1883 | cAcACUUGCUGGCCUGUCUdTsdT |
| AD-27096.1 | 1274 | GAcAGGccAGcAAGuGuGAdTsdT | 1884 | UcAcACUUGCUGGCCUGUCdTsdT |
| AD-27097.1 | 1275 | AcAGGccAGcAAGuGuGAcdTsdT | 1885 | GUcAcACUUGCUGGCCUGUdTsdT |
| AD-27098.1 | 1276 | cAGGccAGcAAGuGuGAcAdTsdT | 1886 | UGUcAcACUUGCUGGCCUGdTsdT |
| AD-27099.1 | 1277 | AGGccAGcAAGuGuGAcAGdTsdT | 1887 | CUGUcAcACUUGCUGGCCUdTsdT |
| AD-27100.1 | 1278 | AGccuGcGcGuGcucAAcudTsdT | 1888 | AGUUGAGcACGCGcAGGCUdTsdT |
| AD-27101.1 | 1279 | GcGcGuGcucAAcuGccAAdTsdT | 1889 | UUGGcAGUUGAGcACGCGCdTsdT |
| AD-27102.1 | 1280 | GuGcucAAcuGccAAGGGAdTsdT | 1890 | UCCCUUGGcAGUUGAGcACdTsdT |
| AD-27103.1 | 1281 | uGcucAAcuGccAAGGGAAdTsdT | 1891 | UUCCCUUGGcAGUUGAGcAdTsdT |
| AD-27104.1 | 1282 | GcucAAcuGccAAGGGAAGdTsdT | 1892 | CUUCCCUUGGcAGUUGAGCdTsdT |
| AD-27105.1 | 1283 | AAcuGccAAGGGAAGGGcAdTsdT | 1893 | UGCCCUUCCCUUGGcAGUUdTsdT |
| AD-27106.1 | 1284 | AcuGccAAGGGAAGGGcAcdTsdT | 1894 | GUGCCCUUCCCUUGGcAGUdTsdT |
| AD-27107.1 | 1285 | cAcccucAuAGGccuGGAGdTsdT | 1895 | CUCcAGGCCuAUGAGGGUGdTsdT |
| AD-27108.1 | 1286 | AcccucAuAGGccuGGAGudTsdT | 1896 | ACUCcAGGCCuAUGAGGGUdTsdT |
| AD-27109.1 | 1287 | cccucAuAGGccuGGAGuudTsdT | 1897 | AACUCcAGGCCuAUGAGGGdTsdT |
| AD-27110.1 | 1288 | ccucAuAGGccuGGAGuuudTsdT | 1898 | AAACUCcAGGCCuAUGAGGdTsdT |
| AD-27111.1 | 1289 | cucAuAGGccuGGAGuuuAdTsdT | 1899 | uAAACUCcAGGCCuAUGAGdTsdT |
| AD-27112.1 | 1290 | ccuGGAGuuuAuucGGAAAdTsdT | 1900 | UUUCCGAAuAAACUCcAGGdTsdT |
| AD-27113.1 | 1291 | uGGAGuuuAuucGGAAAAGdTsdT | 1901 | CUUUUCCGAAuAAACUCcAdTsdT |
| AD-27114.1 | 1292 | AGuuuAuucGGAAAAGccAdTsdT | 1902 | UGGCUUUUCCGAAuAAACUdTsdT |
| AD-27115.1 | 1293 | GuuuAuucGGAAAAGccAGdTsdT | 1903 | CUGGCUUUUCCGAAuAAACdTsdT |
| AD-27116.1 | 1294 | uAuucGGAAAAGccAGcuGdTsdT | 1904 | cAGCUGGCUUUUCCGAAuAdTsdT |
| AD-27117.1 | 1295 | uucGGAAAAGccAGcuGGudTsdT | 1905 | ACcAGCUGGCUUUUCCGAAdTsdT |
| AD-27118.1 | 1296 | ucGGAAAAGccAGcuGGucdTsdT | 1906 | GACcAGCUGGCUUUUCCGAdTsdT |
| AD-27119.1 | 1297 | GGAAAAGccAGcuGGuccAdTsdT | 1907 | UGGACcAGCUGGCUUUUCCdTsdT |
| AD-27120.1 | 1298 | GAAAAGccAGcuGGuccAGdTsdT | 1908 | CUGGACcAGCUGGCUUUUCdTsdT |
| AD-27121.1 | 1299 | ucAccGcuGccGGcAAcuudTsdT | 1909 | AAGUUGCCGGcAGCGGUGAdTsdT |
| AD-27122.1 | 1300 | AAcuuccGGGAcGAuGccudTsdT | 1910 | AGGcAUCGUCCCGGAAGUUdTsdT |
| AD-27123.1 | 1301 | AcuuccGGGAcGAuGccuGdTsdT | 1911 | cAGGcAUCGUCCCGGAAGUdTsdT |
| AD-27124.1 | 1302 | GGGAcGAuGccuGccucuAdTsdT | 1912 | uAGAGGcAGGcAUCGUCCCdTsdT |
| AD-27125.1 | 1303 | GAcGAuGccuGccucuAcudTsdT | 1913 | AGuAGAGGcAGGcAUCGUCdTsdT |
| AD-27126.1 | 1304 | AcGAuGccuGccucuAcucdTsdT | 1914 | GAGuAGAGGcAGGcAUCGUdTsdT |
| AD-27127.1 | 1305 | cccGAGGucAucAcAGuuGdTsdT | 1915 | cAACUGUGAUGACCUCGGGdTsdT |
| AD-27128.1 | 1306 | GucAucAcAGuuGGGGccAdTsdT | 1916 | UGGCCCcAACUGUGAUGACdTsdT |
| AD-27129.1 | 1307 | ucAucAcAGuuGGGGccAcdTsdT | 1917 | GUGGCCCcAACUGUGAUGAdTsdT |
| AD-27130.1 | 1308 | AucAcAGuuGGGGccAccAdTsdT | 1918 | UGGUGGCCCcAACUGUGAUdTsdT |
| AD-27131.1 | 1309 | ucAcAGuuGGGGccAccAAdTsdT | 1919 | UUGGUGGCCCcAACUGUGAdTsdT |
| AD-27132.1 | 1310 | cAcAGuuGGGGccAccAAudTsdT | 1920 | AUUGGUGGCCCcAACUGUGdTsdT |
| AD-27133.1 | 1311 | AcAGuuGGGGccAccAAuGdTsdT | 1921 | cAUUGGUGGCCCcAACUGUdTsdT |
| AD-27134.1 | 1312 | uuGGGGccAccAAuGcccAdTsdT | 1922 | UGGGcAUUGGUGGCCCcAAdTsdT |
| AD-27135.1 | 1313 | cGGuGAcccuGGGGAcuuudTsdT | 1923 | AAAGUCCCcAGGGUcACCGdTsdT |
| AD-27136.1 | 1314 | GGuGAcccuGGGGAcuuuGdTsdT | 1924 | cAAAGUCCCcAGGGUcACCdTsdT |
| AD-27137.1 | 1315 | GGGAcuuuGGGGAccAAcudTsdT | 1925 | AGUUGGUCCCcAAAGUCCCdTsdT |
| AD-27138.1 | 1316 | GGAcuuuGGGGAccAAcuudTsdT | 1926 | AAGUUGGUCCCcAAAGUCCdTsdT |
| AD-27219.1 | 1317 | uGAAGGAGGAGAcccAccudTsdT | 1927 | AGGUGGGUCUCCUCCUUcAdTsdT |
| AD-27220.1 | 1318 | GccuucuuccuGGcuuccudTsdT | 1928 | AGGAAGCcAGGAAGAAGGCdTsdT |
| AD-27221.1 | 1319 | GGAGGAcuccucuGucuuudTsdT | 1929 | AAAGAcAGAGGAGUCCUCCdTsdT |
| AD-27222.1 | 1320 | uGGucAccGAcuucGAGAAdTsdT | 1930 | UUCUCGAAGUCGGUGACcAdTsdT |
| AD-27223.1 | 1321 | GGccAGcAAGuGuGAcAGudTsdT | 1931 | ACUGUcAcACUUGCUGGCCdTsdT |
| AD-27224.1 | 1322 | ucAuGGcAcccAccuGGcAdTsdT | 1932 | UGCcAGGUGGGUGCcAUGAdTsdT |
| AD-27225.1 | 1323 | AAGccAGcuGGuccAGccudTsdT | 1933 | AGGCUGGACcAGCUGGCUUdTsdT |
| AD-27226.1 | 1324 | AGcucccGAGGucAucAcAdTsdT | 1934 | UGUGAUGACCUCGGGAGCUdTsdT |
| AD-27227.1 | 1325 | uGGGGccAccAAuGcccAAdTsdT | 1935 | UUGGGcAUUGGUGGCCCcAdTsdT |
| AD-27228.1 | 1326 | AAGAccAGccGGuGAcccudTsdT | 1936 | AGGGUcACCGGCUGGUCUUdTsdT |
| AD-27229.1 | 1327 | GcAccuGcuuuGuGucAcAdTsdT | 1937 | UGUGAcAcAAAGcAGGUGCdTsdT |
| AD-27230.1 | 1328 | GcuGuuuuGcAGGAcuGuAdTsdT | 1938 | uAcAGUCCUGcAAAAcAGCdTsdT |
| AD-27231.1 | 1329 | GccuAcAcGGAuGGccAcAdTsdT | 1939 | UGUGGCcAUCCGUGuAGGCdTsdT |
| AD-27232.1 | 1330 | GccAAcuGcAGcGuccAcAdTsdT | 1940 | UGUGGACGCUGcAGUUGGCdTsdT |
| AD-27233.1 | 1331 | AcAcAGcuccAccAGcuGAdTsdT | 1941 | UcAGCUGGUGGAGCUGUGUdTsdT |
| AD-27234.1 | 1332 | AcAGGGccAcGuccucAcAdTsdT | 1942 | UGUGAGGACGUGGCCCUGUdTsdT |
| AD-27235.1 | 1333 | uAGucAGGAGccGGGAcGudTsdT | 1943 | ACGUCCCGGCUCCUGACuAdTsdT |
| AD-27236.1 | 1334 | uAcAGGcAGcAccAGcGAAdTsdT | 1944 | UUCGCUGGUGCUGCCUGuAdTsdT |
| AD-27237.1 | 1335 | AcAGccGuuGccAucuGcudTsdT | 1945 | AGcAGAUGGcAACGGCUGUdTsdT |
| AD-27238.1 | 1336 | AAGGGcuGGGGcuGAGcuudTsdT | 1946 | AAGCUcAGCCCcAGCCCUUdTsdT |
| AD-27239.1 | 1337 | AGGGcuGGGGcuGAGcuuudTsdT | 1947 | AAAGCUcAGCCCcAGCCCUdTsdT |
| AD-27240.1 | 1338 | ucucAGcccuccAuGGccudTsdT | 1948 | AGGCcAUGGAGGGCUGAGAdTsdT |
| AD-27241.1 | 1339 | GcuGccAGcuGcucccAAudTsdT | 1949 | AUUGGGAGcAGCUGGcAGCdTsdT |
| AD-27242.1 | 1340 | GGucuccAccAAGGAGGcAdTsdT | 1950 | UGCCUCCUUGGUGGAGACCdTsdT |
| AD-27243.1 | 1341 | GcAGGAuucuucccAuGGAdTsdT | 1951 | UCcAUGGGAAGAAUCCUGCdTsdT |
| AD-27244.1 | 1342 | GuGcuGAuGGcccucAucudTsdT | 1952 | AGAUGAGGGCcAUcAGcACdTsdT |
| AD-27245.1 | 1343 | uGGcccucAucuccAGcuAdTsdT | 1953 | uAGCUGGAGAUGAGGGCcAdTsdT |
| AD-27246.1 | 1344 | uuAGcuuucuGGAuGGcAudTsdT | 1954 | AUGCcAUCcAGAAAGCuAAdTsdT |
| AD-27247.1 | 1345 | cuGcucuAuGccAGGcuGudTsdT | 1955 | AcAGCCUGGcAuAGAGcAGdTsdT |
| AD-27248.1 | 1346 | GcucuGAAGccAAGccucudTsdT | 1956 | AGAGGCUUGGCUUcAGAGCdTsdT |
| AD-27249.1 | 1347 | GAAcGAuGccuGcAGGcAudTsdT | 1957 | AUGCCUGcAGGcAUCGUUCdTsdT |
| AD-27250.1 | 1348 | AAcAAcuGucccuccuuGAdTsdT | 1958 | UcAAGGAGGGAcAGUUGUUdTsdT |
| AD-27251.1 | 1349 | GuuGccuuuuuAcAGccAAdTsdT | 1959 | UUGGCUGuAAAAAGGcAACdTsdT |
| AD-27252.1 | 1350 | uucuAGAccuGuuuuGcuuuu | 1960 | AAGcAAAAcAGGUCuAGAAuu |
| AD-27253.1 | 1351 | uucuAGAccuGuuuuGcuuuu | 1961 | AAGCaAaAcAgGuCuAgAauu |
| AD-27254.1 | 1352 | UUCUaGaCcUgUuUuGcUuuu | 1962 | AAGcAAAAcAGGUCuAGAAuu |
| AD-27255.1 | 1353 | UUCUAGACCUGUUUUGCUUUU | 1963 | AAGCAAAACAGGUCUAGAAUU |
| AD-27256.1 | 1354 | UUCUAGACCUGUUUUGCUUUU | 1964 | AAGCaAaAcAgGuCuAgAauu |
| AD-27257.1 | 1355 | UUCUaGaCcUgUuUuGcUuuu | 1965 | AAGCAAAACAGGUCUAGAAUU |
| AD-27258.1 | 1356 | UUCUaGaCcUgUuUuGcUuuu | 1966 | AAGCaAaAcAgGuCuAgAauu |
| AD-27259.1 | 1357 | UUCUaGaCcUgUuUuGcUudTsdT | 1967 | AAGCaAaAcAgGuCuAgAadTsdT |
| AD-27260.1 | 1358 | ucAGcuccuGcAcAGuccudTsdT | 1968 | AGGACUGUGcAGGAGCUGAdTsdT |
| AD-27262.1 | 1359 | ccAAGGGAAGGGcAcGGuudTsdT | 1969 | AACCGUGCCCUUCCCUUGGdTsdT |
| AD-27265.1 | 1360 | cuGGcAccuAcGuGGuGGudTsdT | 1970 | ACcACcACGuAGGUGCcAGdTsdT |
| AD-27267.1 | 1361 | uccuAGAccuGuuuuGcuudTsdT | 1971 | AAGcAAAAcAGGUCuAGGAdTsdT |
| AD-27268.1 | 1362 | uucuAGAccuGuuuuGcuudTsdT | 1972 | AAGcAAAAcAGGUCuAGAAdT |
| AD-27269.1 | 1363 | uucuAGAccuGuuuuGcuudTsdT | 1973 | AAGcAAAAcAGGUCuAGAA |
| AD-27270.1 | 1364 | uucuAGAccuGuuuuGcuudTsdT | 1974 | AAGcAAAAcAGGUCuAGA |
| AD-27271.1 | 1365 | uucuAGAccuGuuuuGcuudTsdT | 1975 | AAGcAAAAcAGGUCuAG |
| AD-27272.1 | 1366 | uucuAGAccuGuuuuGcuudTsdT | 1976 | AAGcAAAAcAGGUCuA |
| AD-27273.1 | 1367 | uucuAGAccuGuuuuGcuudTsdT | 1977 | AAGcAAAAcAGGUCu |
| AD-27274.1 | 1368 | uucuAGAccuGuuuuGcuudTsdT | 1978 | AGcAAAAcAGGUCuAGAAdTsdT |
| AD-27275.1 | 1369 | uucuAGAccuGuuuuGcuudTsdT | 1979 | GcAAAAcAGGUCuAGAAdTsdT |
| AD-27276.1 | 1370 | uucuAGAccuGuuuuGcuudTsdT | 1980 | cAAAAcAGGUCuAGAAdTsdT |
| AD-27277.1 | 1371 | uucuAGAccuGuuuuGcuudTsdT | 1981 | AAAAcAGGUCuAGAAdTsdT |
| AD-27278.1 | 1372 | uucuAGAccuGuuuuGcuudTsdT | 1982 | AAAcAGGUCuAGAAdTsdT |
| AD-27279.1 | 1373 | uucuAGAccuGuuuuGcuudTsdT | 1983 | AAcAGGUCuAGAAdTsdT |
| AD-27292.1 | 1374 | GAcuuuGGGGAccAAcuuudTsdT | 1984 | AAAGUUGGUCCCcAAAGUCdTsdT |
| AD-27293.1 | 1375 | AcuuuGGGGAccAAcuuuGdTsdT | 1985 | cAAAGUUGGUCCCcAAAGUdTsdT |
| AD-27294.1 | 1376 | GGGAccAAcuuuGGccGcudTsdT | 1986 | AGCGGCcAAAGUUGGUCCCdTsdT |
| AD-27295.1 | 1377 | GGAccAAcuuuGGccGcuGdTsdT | 1987 | cAGCGGCcAAAGUUGGUCCdTsdT |
| AD-27296.1 | 1378 | GAccAAcuuuGGccGcuGudTsdT | 1988 | AcAGCGGCcAAAGUUGGUCdTsdT |
| AD-27297.1 | 1379 | ccAAcuuuGGccGcuGuGudTsdT | 1989 | AcAcAGCGGCcAAAGUUGGdTsdT |
| AD-27298.1 | 1380 | AcuuuGGccGcuGuGuGGAdTsdT | 1990 | UCcAcAcAGCGGCcAAAGUdTsdT |
| AD-27299.1 | 1381 | cuuuGGccGcuGuGuGGAcdTsdT | 1991 | GUCcAcAcAGCGGCcAAAGdTsdT |
| AD-27300.1 | 1382 | uuGGccGcuGuGuGGAccudTsdT | 1992 | AGGUCcAcAcAGCGGCcAAdTsdT |
| AD-27301.1 | 1383 | GccGcuGuGuGGAccucuudTsdT | 1993 | AAGAGGUCcAcAcAGCGGCdTsdT |
| AD-27302.1 | 1384 | ccGcuGuGuGGAccucuuudTsdT | 1994 | AAAGAGGUCcAcAcAGCGGdTsdT |
| AD-27303.1 | 1385 | uGuGGAccucuuuGccccAdTsdT | 1995 | UGGGGcAAAGAGGUCcAcAdTsdT |
| AD-27304.1 | 1386 | GuGGAccucuuuGccccAGdTsdT | 1996 | CUGGGGcAAAGAGGUCcACdTsdT |
| AD-27305.1 | 1387 | cccAGGGGAGGAcAucAuudTsdT | 1997 | AAUGAUGUCCUCCCCUGGGdTsdT |
| AD-27306.1 | 1388 | ccAGGGGAGGAcAucAuuGdTsdT | 1998 | cAAUGAUGUCCUCCCCUGGdTsdT |
| AD-27307.1 | 1389 | AGGGGAGGAcAucAuuGGudTsdT | 1999 | ACcAAUGAUGUCCUCCCCUdTsdT |
| AD-27308.1 | 1390 | GGGGAGGAcAucAuuGGuGdTsdT | 2000 | cACcAAUGAUGUCCUCCCCdTsdT |
| AD-27309.1 | 1391 | GAGGAcAucAuuGGuGccudTsdT | 2001 | AGGcACcAAUGAUGUCCUCdTsdT |
| AD-27310.1 | 1392 | AGGAcAucAuuGGuGccucdTsdT | 2002 | GAGGcACcAAUGAUGUCCUdTsdT |
| AD-27311.1 | 1393 | AcAucAuuGGuGccuccAGdTsdT | 2003 | CUGGAGGcACcAAUGAUGUdTsdT |
| AD-27312.1 | 1394 | cAuuGGuGccuccAGcGAcdTsdT | 2004 | GUCGCUGGAGGcACcAAUGdTsdT |
| AD-27313.1 | 1395 | AuuGGuGccuccAGcGAcudTsdT | 2005 | AGUCGCUGGAGGcACcAAUdTsdT |
| AD-27314.1 | 1396 | uuGGuGccuccAGcGAcuGdTsdT | 2006 | cAGUCGCUGGAGGcACcAAdTsdT |
| AD-27315.1 | 1397 | uccAGcGAcuGcAGcAccudTsdT | 2007 | AGGUGCUGcAGUCGCUGGAdTsdT |
| AD-27316.1 | 1398 | AGcGAcuGcAGcAccuGcudTsdT | 2008 | AGcAGGUGCUGcAGUCGCUdTsdT |
| AD-27317.1 | 1399 | GcGAcuGcAGcAccuGcuudTsdT | 2009 | AAGcAGGUGCUGcAGUCGCdTsdT |
| AD-27318.1 | 1400 | cGAcuGcAGcAccuGcuuudTsdT | 2010 | AAAGcAGGUGCUGcAGUCGdTsdT |
| AD-27319.1 | 1401 | GAcuGcAGcAccuGcuuuGdTsdT | 2011 | cAAAGcAGGUGCUGcAGUCdTsdT |
| AD-27320.1 | 1402 | AcuGcAGcAccuGcuuuGudTsdT | 2012 | AcAAAGcAGGUGCUGcAGUdTsdT |
| AD-27321.1 | 1403 | cuGcAGcAccuGcuuuGuGdTsdT | 2013 | cAcAAAGcAGGUGCUGcAGdTsdT |
| AD-27322.1 | 1404 | uGcAGcAccuGcuuuGuGudTsdT | 2014 | AcAcAAAGcAGGUGCUGcAdTsdT |
| AD-27323.1 | 1405 | GcAGcAccuGcuuuGuGucdTsdT | 2015 | GAcAcAAAGcAGGUGCUGCdTsdT |
| AD-27324.1 | 1406 | cAGcAccuGcuuuGuGucAdTsdT | 2016 | UGAcAcAAAGcAGGUGCUGdTsdT |
| AD-27325.1 | 1407 | uGcccAcGuGGcuGGcAuudTsdT | 2017 | AAUGCcAGCcACGUGGGcAdTsdT |
| AD-27326.1 | 1408 | ccAcGuGGcuGGcAuuGcAdTsdT | 2018 | UGcAAUGCcAGCcACGUGGdTsdT |
| AD-27327.1 | 1409 | cAcGuGGcuGGcAuuGcAGdTsdT | 2019 | CUGcAAUGCcAGCcACGUGdTsdT |
| AD-27328.1 | 1410 | GuGGcuGGcAuuGcAGccAdTsdT | 2020 | UGGCUGcAAUGCcAGCcACdTsdT |
| AD-27329.1 | 1411 | uGGcuGGcAuuGcAGccAudTsdT | 2021 | AUGGCUGcAAUGCcAGCcAdTsdT |
| AD-27330.1 | 1412 | GGcuGGcAuuGcAGccAuGdTsdT | 2022 | cAUGGCUGcAAUGCcAGCCdTsdT |
| AD-27331.1 | 1413 | GcuGGcAuuGcAGccAuGAdTsdT | 2023 | UcAUGGCUGcAAUGCcAGCdTsdT |
| AD-27332.1 | 1414 | cuGGcAuuGcAGccAuGAudTsdT | 2024 | AUcAUGGCUGcAAUGCcAGdTsdT |
| AD-27333.1 | 1415 | uGGcAuuGcAGccAuGAuGdTsdT | 2025 | cAUcAUGGCUGcAAUGCcAdTsdT |
| AD-27334.1 | 1416 | GcAuuGcAGccAuGAuGcudTsdT | 2026 | AGcAUcAUGGCUGcAAUGCdTsdT |
| AD-27335.1 | 1417 | cAuuGcAGccAuGAuGcuGdTsdT | 2027 | cAGcAUcAUGGCUGcAAUGdTsdT |
| AD-27336.1 | 1418 | AuuGcAGccAuGAuGcuGudTsdT | 2028 | AcAGcAUcAUGGCUGcAAUdTsdT |
| AD-27337.1 | 1419 | uuGcAGccAuGAuGcuGucdTsdT | 2029 | GAcAGcAUcAUGGCUGcAAdTsdT |
| AD-27338.1 | 1420 | uGcAGccAuGAuGcuGucudTsdT | 2030 | AGAcAGcAUcAUGGCUGcAdTsdT |
| AD-27339.1 | 1421 | GcAGccAuGAuGcuGucuGdTsdT | 2031 | cAGAcAGcAUcAUGGCUGCdTsdT |
| AD-27340.1 | 1422 | ccAuGAuGcuGucuGccGAdTsdT | 2032 | UCGGcAGAcAGcAUcAUGGdTsdT |
| AD-27341.1 | 1423 | cAuGAuGcuGucuGccGAGdTsdT | 2033 | CUCGGcAGAcAGcAUcAUGdTsdT |
| AD-27342.1 | 1424 | cuGGccGAGuuGAGGcAGAdTsdT | 2034 | UCUGCCUcAACUCGGCcAGdTsdT |
| AD-27343.1 | 1425 | uGGccGAGuuGAGGcAGAGdTsdT | 2035 | CUCUGCCUcAACUCGGCcAdTsdT |
| AD-27344.1 | 1426 | GGccGAGuuGAGGcAGAGAdTsdT | 2036 | UCUCUGCCUcAACUCGGCCdTsdT |
| AD-27345.1 | 1427 | GccGAGuuGAGGcAGAGAcdTsdT | 2037 | GUCUCUGCCUcAACUCGGCdTsdT |
| AD-27346.1 | 1428 | ccGAGuuGAGGcAGAGAcudTsdT | 2038 | AGUCUCUGCCUcAACUCGGdTsdT |
| AD-27347.1 | 1429 | cGAGuuGAGGcAGAGAcuGdTsdT | 2039 | cAGUCUCUGCCUcAACUCGdTsdT |
| AD-27348.1 | 1430 | GAGuuGAGGcAGAGAcuGAdTsdT | 2040 | UcAGUCUCUGCCUcAACUCdTsdT |
| AD-27349.1 | 1431 | AGuuGAGGcAGAGAcuGAudTsdT | 2041 | AUcAGUCUCUGCCUcAACUdTsdT |
| AD-27350.1 | 1432 | uGAGGcAGAGAcuGAuccAdTsdT | 2042 | UGGAUcAGUCUCUGCCUcAdTsdT |
| AD-27351.1 | 1433 | GAGGcAGAGAcuGAuccAcdTsdT | 2043 | GUGGAUcAGUCUCUGCCUCdTsdT |
| AD-27352.1 | 1434 | AGGcAGAGAcuGAuccAcudTsdT | 2044 | AGUGGAUcAGUCUCUGCCUdTsdT |
| AD-27353.1 | 1435 | GGcAGAGAcuGAuccAcuudTsdT | 2045 | AAGUGGAUcAGUCUCUGCCdTsdT |
| AD-27354.1 | 1436 | cAGAGAcuGAuccAcuucudTsdT | 2046 | AGAAGUGGAUcAGUCUCUGdTsdT |
| AD-27355.1 | 1437 | GAGAcuGAuccAcuucucudTsdT | 2047 | AGAGAAGUGGAUcAGUCUCdTsdT |
| AD-27356.1 | 1438 | AGAcuGAuccAcuucucuGdTsdT | 2048 | cAGAGAAGUGGAUcAGUCUdTsdT |
| AD-27357.1 | 1439 | cuGAuccAcuucucuGccAdTsdT | 2049 | UGGcAGAGAAGUGGAUcAGdTsdT |
| AD-27358.1 | 1440 | uGAuccAcuucucuGccAAdTsdT | 2050 | UUGGcAGAGAAGUGGAUcAdTsdT |
| AD-27359.1 | 1441 | GAuccAcuucucuGccAAAdTsdT | 2051 | UUUGGcAGAGAAGUGGAUCdTsdT |
| AD-27360.1 | 1442 | AuccAcuucucuGccAAAGdTsdT | 2052 | CUUUGGcAGAGAAGUGGAUdTsdT |
| AD-27361.1 | 1443 | uccAcuucucuGccAAAGAdTsdT | 2053 | UCUUUGGcAGAGAAGUGGAdTsdT |
| AD-27362.1 | 1444 | ccAcuucucuGccAAAGAudTsdT | 2054 | AUCUUUGGcAGAGAAGUGGdTsdT |
| AD-27363.1 | 1445 | cAcuucucuGccAAAGAuGdTsdT | 2055 | cAUCUUUGGcAGAGAAGUGdTsdT |
| AD-27364.1 | 1446 | AcuucucuGccAAAGAuGudTsdT | 2056 | AcAUCUUUGGcAGAGAAGUdTsdT |
| AD-27365.1 | 1447 | cuucucuGccAAAGAuGucdTsdT | 2057 | GAcAUCUUUGGcAGAGAAGdTsdT |
| AD-27366.1 | 1448 | ucucuGccAAAGAuGucAudTsdT | 2058 | AUGAcAUCUUUGGcAGAGAdTsdT |
| AD-27367.1 | 1449 | ucuGccAAAGAuGucAucAdTsdT | 2059 | UGAUGAcAUCUUUGGcAGAdTsdT |
| AD-27368.1 | 1450 | cuGccAAAGAuGucAucAAdTsdT | 2060 | UUGAUGAcAUCUUUGGcAGdTsdT |
| AD-27369.1 | 1451 | uGccAAAGAuGucAucAAudTsdT | 2061 | AUUGAUGAcAUCUUUGGcAdTsdT |
| AD-27370.1 | 1452 | GccAAAGAuGucAucAAuGdTsdT | 2062 | cAUUGAUGAcAUCUUUGGCdTsdT |
| AD-27371.1 | 1453 | ccAAAGAuGucAucAAuGAdTsdT | 2063 | UcAUUGAUGAcAUCUUUGGdTsdT |
| AD-27372.1 | 1454 | cAAAGAuGucAucAAuGAGdTsdT | 2064 | CUcAUUGAUGAcAUCUUUGdTsdT |
| AD-27373.1 | 1455 | GAuGucAucAAuGAGGccudTsdT | 2065 | AGGCCUcAUUGAUGAcAUCdTsdT |
| AD-27374.1 | 1456 | AuGucAucAAuGAGGccuGdTsdT | 2066 | cAGGCCUcAUUGAUGAcAUdTsdT |
| AD-27375.1 | 1457 | GucAucAAuGAGGccuGGudTsdT | 2067 | ACcAGGCCUcAUUGAUGACdTsdT |
| AD-27376.1 | 1458 | ucAucAAuGAGGccuGGuudTsdT | 2068 | AACcAGGCCUcAUUGAUGAdTsdT |
| AD-27377.1 | 1459 | cAucAAuGAGGccuGGuucdTsdT | 2069 | GAACcAGGCCUcAUUGAUGdTsdT |
| AD-27378.1 | 1460 | cAAuGAGGccuGGuucccudTsdT | 2070 | AGGGAACcAGGCCUcAUUGdTsdT |
| AD-27379.1 | 1461 | AAuGAGGccuGGuucccuGdTsdT | 2071 | cAGGGAACcAGGCCUcAUUdTsdT |
| AD-27380.1 | 1462 | AuGAGGccuGGuucccuGAdTsdT | 2072 | UcAGGGAACcAGGCCUcAUdTsdT |
| AD-27381.1 | 1463 | uGAGGccuGGuucccuGAGdTsdT | 2073 | CUcAGGGAACcAGGCCUcAdTsdT |
| AD-27382.1 | 1464 | AGGccuGGuucccuGAGGAdTsdT | 2074 | UCCUcAGGGAACcAGGCCUdTsdT |
| AD-27383.1 | 1465 | GAGGAccAGcGGGuAcuGAdTsdT | 2075 | UcAGuACCCGCUGGUCCUCdTsdT |
| AD-27384.1 | 1466 | AGGAccAGcGGGuAcuGAcdTsdT | 2076 | GUcAGuACCCGCUGGUCCUdTsdT |
| AD-27385.1 | 1467 | GGGcAGGuuGGcAGcuGuudTsdT | 2077 | AAcAGCUGCcAACCUGCCCdTsdT |
| AD-27386.1 | 1468 | GGcAGGuuGGcAGcuGuuudTsdT | 2078 | AAAcAGCUGCcAACCUGCCdTsdT |
| AD-27387.1 | 1469 | GcAGGuuGGcAGcuGuuuudTsdT | 2079 | AAAAcAGCUGCcAACCUGCdTsdT |
| AD-27493.1 | 1470 | AGccuGGAGGAGuGAGccAdTsdT | 2080 | UGGCUcACUCCUCcAGGCUdTsdT |
| AD-27494.1 | 1471 | uGGAGGAGuGAGccAGGcAdTsdT | 2081 | UGCCUGGCUcACUCCUCcAdTsdT |
| AD-27495.1 | 1472 | GAGGAGuGAGccAGGcAGudTsdT | 2082 | ACUGCCUGGCUcACUCCUCdTsdT |
| AD-27496.1 | 1473 | AGGAGuGAGccAGGcAGuGdTsdT | 2083 | cACUGCCUGGCUcACUCCUdTsdT |
| AD-27497.1 | 1474 | GGAGuGAGccAGGcAGuGAdTsdT | 2084 | UcACUGCCUGGCUcACUCCdTsdT |
| AD-27498.1 | 1475 | GAGuGAGccAGGcAGuGAGdTsdT | 2085 | CUcACUGCCUGGCUcACUCdTsdT |
| AD-27499.1 | 1476 | AGuGAGccAGGcAGuGAGAdTsdT | 2086 | UCUcACUGCCUGGCUcACUdTsdT |
| AD-27500.1 | 1477 | GuGAGccAGGcAGuGAGAcdTsdT | 2087 | GUCUcACUGCCUGGCUcACdTsdT |
| AD-27501.1 | 1478 | uGAGccAGGcAGuGAGAcudTsdT | 2088 | AGUCUcACUGCCUGGCUcAdTsdT |
| AD-27502.1 | 1479 | GAGccAGGcAGuGAGAcuGdTsdT | 2089 | cAGUCUcACUGCCUGGCUCdTsdT |
| AD-27503.1 | 1480 | ccAGcucccAGccAGGAuudTsdT | 2090 | AAUCCUGGCUGGGAGCUGGdTsdT |
| AD-27504.1 | 1481 | cAGcucccAGccAGGAuucdTsdT | 2091 | GAAUCCUGGCUGGGAGCUGdTsdT |
| AD-27505.1 | 1482 | cAGcuccuGcAcAGuccucdTsdT | 2092 | GAGGACUGUGcAGGAGCUGdTsdT |
| AD-27506.1 | 1483 | uccuGcAcAGuccuccccAdTsdT | 2093 | UGGGGAGGACUGUGcAGGAdTsdT |
| AD-27507.1 | 1484 | cAcGGccucuAGGucuccudTsdT | 2094 | AGGAGACCuAGAGGCCGUGdTsdT |
| AD-27508.1 | 1485 | AcGGccucuAGGucuccucdTsdT | 2095 | GAGGAGACCuAGAGGCCGUdTsdT |
| AD-27509.1 | 1486 | AGGAcGAGGAcGGcGAcuAdTsdT | 2096 | uAGUCGCCGUCCUCGUCCUdTsdT |
| AD-27510.1 | 1487 | AcGAGGAcGGcGAcuAcGAdTsdT | 2097 | UCGuAGUCGCCGUCCUCGUdTsdT |
| AD-27511.1 | 1488 | AGGAcGGcGAcuAcGAGGAdTsdT | 2098 | UCCUCGuAGUCGCCGUCCUdTsdT |
| AD-27512.1 | 1489 | AcGGcGAcuAcGAGGAGcudTsdT | 2099 | AGCUCCUCGuAGUCGCCGUdTsdT |
| AD-27513.1 | 1490 | GcGAcuAcGAGGAGcuGGudTsdT | 2100 | ACcAGCUCCUCGuAGUCGCdTsdT |
| AD-27514.1 | 1491 | cGAcuAcGAGGAGcuGGuGdTsdT | 2101 | cACcAGCUCCUCGuAGUCGdTsdT |
| AD-27515.1 | 1492 | AcuAcGAGGAGcuGGuGcudTsdT | 2102 | AGcACcAGCUCCUCGuAGUdTsdT |
| AD-27516.1 | 1493 | cuAcGAGGAGcuGGuGcuAdTsdT | 2103 | uAGcAGcAGCUCCUCGuAGdTsdT |
| AD-27517.1 | 1494 | uAcGAGGAGcuGGuGcuAGdTsdT | 2104 | CuAGcAGcAGCUCCUCGuAdTsdT |
| AD-27518.1 | 1495 | GAGGAGcuGGuGcuAGccudTsdT | 2105 | AGGCuAGcACcAGCUCCUCdTsdT |
| AD-27519.1 | 1496 | AGGAGcuGGuGcuAGccuudTsdT | 2106 | AAGGCuAGcACcAGCUCCUdTsdT |
| AD-27520.1 | 1497 | uGGuGcuAGccuuGcGuucdTsdT | 2107 | GAACGcAAGGCuAGcACcAdTsdT |
| AD-27521.1 | 1498 | GcuAGccuuGcGuuccGAGdTsdT | 2108 | CUCGGAACGcAAGGCuAGCdTsdT |
| AD-27522.1 | 1499 | AGccuuGcGuuccGAGGAGdTsdT | 2109 | CUCCUCGGAACGcAAGGCUdTsdT |
| AD-27523.1 | 1500 | ccuuGcGuuccGAGGAGGAdTsdT | 2110 | UCCUCCUCGGAACGcAAGGdTsdT |
| AD-27524.1 | 1501 | cuuGcGuuccGAGGAGGAcdTsdT | 2111 | GUCCUCCUCGGAACGcAAGdTsdT |
| AD-27525.1 | 1502 | AcAGccAccuuccAccGcudTsdT | 2112 | AGCGGUGGAAGGUGGCUGUdTsdT |
| AD-27526.1 | 1503 | uGcGccAAGGAuccGuGGAdTsdT | 2113 | UCcACGGAUCCUUGGCGcAdTsdT |
| AD-27527.1 | 1504 | GcAccuAcGuGGuGGuGcudTsdT | 2114 | AGcACcACcACGuAGGUGCdTsdT |
| AD-27528.1 | 1505 | cAccuAcGuGGuGGuGcuGdTsdT | 2115 | cAGcACcACcACGuAGGUGdTsdT |
| AD-27529.1 | 1506 | AccuAcGuGGuGGuGcuGAdTsdT | 2116 | UcAGcACcACcACGuAGGUdTsdT |
| AD-27530.1 | 1507 | ccuAcGuGGuGGuGcuGAAdTsdT | 2117 | UUcAGcACcACcACGuAGGdTsdT |
| AD-27531.1 | 1508 | cuAcGuGGuGGuGcuGAAGdTsdT | 2118 | CUUcAGcACcACcACGuAGdTsdT |
| AD-27532.1 | 1509 | AcGuGGuGGuGcuGAAGGAdTsdT | 2119 | UCCUUcAGcACcACcACGUdTsdT |
| AD-27533.1 | 1510 | cGuGGuGGuGcuGAAGGAGdTsdT | 2120 | CUCCUUcAGcACcACcACGdTsdT |
| AD-27534.1 | 1511 | uGGuGGuGcuGAAGGAGGAdTsdT | 2121 | UCCUCCUUcAGcACcACcAdTsdT |
| AD-27535.1 | 1512 | GGuGGuGcuGAAGGAGGAGdTsdT | 2122 | CUCCUCCUUcAGcACcACCdTsdT |
| AD-27536.1 | 1513 | GuGGuGcuGAAGGAGGAGAdTsdT | 2123 | UCUCCUCCUUcAGcACcACdTsdT |
| AD-27537.1 | 1514 | uGGuGcuGAAGGAGGAGAcdTsdT | 2124 | GUCUCCUCCUUcAGcACcAdTsdT |
| AD-27538.1 | 1515 | uGcuGAAGGAGGAGAcccAdTsdT | 2125 | UGGGUCUCCUCCUUcAGcAdTsdT |
| AD-27539.1 | 1516 | GcuGAAGGAGGAGAcccAcdTsdT | 2126 | GUGGGUCUCCUCCUUcAGCdTsdT |
| AD-27540.1 | 1517 | ucGcAGucAGAGcGcAcuGdTsdT | 2127 | cAGUGCGCUCUGACUGCGAdTsdT |
| AD-27541.1 | 1518 | GccGGGGAuAccucAccAAdTsdT | 2128 | UUGGUGAGGuAUCCCCGGCdTsdT |
| AD-27542.1 | 1519 | ccGGGGAuAccucAccAAGdTsdT | 2129 | CUUGGUGAGGuAUCCCCGGdTsdT |
| AD-27543.1 | 1520 | cGGGGAuAccucAccAAGAdTsdT | 2130 | UCUUGGUGAGGuAUCCCCGdTsdT |
| AD-27544.1 | 1521 | GGGGAuAccucAccAAGAudTsdT | 2131 | AUCUUGGUGAGGuAUCCCCdTsdT |
| AD-27545.1 | 1522 | GAuAccucAccAAGAuccudTsdT | 2132 | AGGAUCUUGGUGAGGuAUCdTsdT |
| AD-27546.1 | 1523 | AuAccucAccAAGAuccuGdTsdT | 2133 | cAGGAUCUUGGUGAGGuAUdTsdT |
| AD-27547.1 | 1524 | AccucAccAAGAuccuGcAdTsdT | 2134 | UGcAGGAUCUUGGUGAGGUdTsdT |
| AD-27548.1 | 1525 | ccucAccAAGAuccuGcAudTsdT | 2135 | AUGcAGGAUCUUGGUGAGGdTsdT |
| AD-27549.1 | 1526 | cucAccAAGAuccuGcAuGdTsdT | 2136 | cAUGcAGGAUCUUGGUGAGdTsdT |
| AD-27550.1 | 1527 | ucAccAAGAuccuGcAuGudTsdT | 2137 | AcAUGcAGGAUCUUGGUGAdTsdT |
| AD-27551.1 | 1528 | cAccAAGAuccuGcAuGucdTsdT | 2138 | GAcAUGcAGGAUCUUGGUGdTsdT |
| AD-27552.1 | 1529 | AccAAGAuccuGcAuGucudTsdT | 2139 | AGAcAUGcAGGAUCUUGGUdTsdT |
| AD-27553.1 | 1530 | ccAAGAuccuGcAuGucuudTsdT | 2140 | AAGAcAUGcAGGAUCUUGGdTsdT |
| AD-27554.1 | 1531 | cAAGAuccuGcAuGucuucdTsdT | 2141 | GAAGAcAUGcAGGAUCUUGdTsdT |
| AD-27555.1 | 1532 | AGAuccuGcAuGucuuccAdTsdT | 2142 | UGGAAGAcAUGcAGGAUCUdTsdT |
| AD-27556.1 | 1533 | GAuccuGcAuGucuuccAudTsdT | 2143 | AUGGAAGAcAUGcAGGAUCdTsdT |
| AD-27557.1 | 1534 | ccuucuuccuGGcuuccuGdTsdT | 2144 | cAGGAAGCcAGGAAGAAGGdTsdT |
| AD-27558.1 | 1535 | uucuuccuGGcuuccuGGudTsdT | 2145 | ACcAGGAAGCcAGGAAGAAdTsdT |
| AD-27559.1 | 1536 | ucuuccuGGcuuccuGGuGdTsdT | 2146 | cACcAGGAAGCcAGGAAGAdTsdT |
| AD-27560.1 | 1537 | cuuccuGGcuuccuGGuGAdTsdT | 2147 | UcACcAGGAAGCcAGGAAGdTsdT |
| AD-27561.1 | 1538 | uuccuGGcuuccuGGuGAAdTsdT | 2148 | UUcACcAGGAAGCcAGGAAdTsdT |
| AD-27562.1 | 1539 | uccuGGcuuccuGGuGAAGdTsdT | 2149 | CUUcACcAGGAAGCcAGGAdTsdT |
| AD-27563.1 | 1540 | ccuGGcuuccuGGuGAAGAdTsdT | 2150 | UCUUcACcAGGAAGCcAGGdTsdT |
| AD-27564.1 | 1541 | cuGGcuuccuGGuGAAGAudTsdT | 2151 | AUCUUcACcAGGAAGCcAGdTsdT |
| AD-27565.1 | 1542 | uGGcuuccuGGuGAAGAuGdTsdT | 2152 | cAUCUUcACcAGGAAGCcAdTsdT |
| AD-27566.1 | 1543 | GGcuuccuGGuGAAGAuGAdTsdT | 2153 | UcAUCUUcACcAGGAAGCCdTsdT |
| AD-27567.1 | 1544 | GcuuccuGGuGAAGAuGAGdTsdT | 2154 | CUcAUCUUcACcAGGAAGCdTsdT |
| AD-27568.1 | 1545 | cuuccuGGuGAAGAuGAGudTsdT | 2155 | ACUcAUCUUcACcAGGAAGdTsdT |
| AD-27569.1 | 1546 | uuccuGGuGAAGAuGAGuGdTsdT | 2156 | cACUcAUCUUcACcAGGAAdTsdT |
| AD-27570.1 | 1547 | GGuGAAGAuGAGuGGcGAcdTsdT | 2157 | GUCGCcACUcAUCUUcACCdTsdT |
| AD-27571.1 | 1548 | uGAAGAuGAGuGGcGAccudTsdT | 2158 | AGGUCGCcACUcAUCUUcAdTsdT |
| AD-27572.1 | 1549 | AGAuGAGuGGcGAccuGcudTsdT | 2159 | AGcAGGUCGCcACUcAUCUdTsdT |
| AD-27573.1 | 1550 | GAuGAGuGGcGAccuGcuGdTsdT | 2160 | cAGcAGGUCGCcACUcAUCdTsdT |
| AD-27574.1 | 1551 | uGAGuGGcGAccuGcuGGAdTsdT | 2161 | UCcAGcAGGUCGCcACUcAdTsdT |
| AD-27575.1 | 1552 | uGAAGuuGccccAuGucGAdTsdT | 2162 | UCGAcAUGGGGcAACUUcAdTsdT |
| AD-27576.1 | 1553 | GAAGuuGccccAuGucGAcdTsdT | 2163 | GUCGAcAUGGGGcAACUUCdTsdT |
| AD-27577.1 | 1554 | AAGuuGccccAuGucGAcudTsdT | 2164 | AGUCGAcAUGGGGcAACUUdTsdT |
| AD-27578.1 | 1555 | AGuuGccccAuGucGAcuAdTsdT | 2165 | uAGUCGAcAUGGGGcAACUdTsdT |
| AD-27579.1 | 1556 | GuuGccccAuGucGAcuAcdTsdT | 2166 | GuAGUCGAcAUGGGGcAACdTsdT |
| AD-27580.1 | 1557 | uuGccccAuGucGAcuAcAdTsdT | 2167 | UGuAGUCGAcAUGGGGcAAdTsdT |
| AD-27581.1 | 1558 | uGccccAuGucGAcuAcAudTsdT | 2168 | AUGuAGUCGAcAUGGGGcAdTsdT |
| AD-27582.1 | 1559 | GccccAuGucGAcuAcAucdTsdT | 2169 | GAUGuAGUCGAcAUGGGGCdTsdT |
| AD-27583.1 | 1560 | ccAuGucGAcuAcAucGAGdTsdT | 2170 | CUCGAUGuAGUCGAcAUGGdTsdT |
| AD-27584.1 | 1561 | AuGucGAcuAcAucGAGGAdTsdT | 2171 | UCCUCGAUGuAGUCGAcAUdTsdT |
| AD-27585.1 | 1562 | uGucGAcuAcAucGAGGAGdTsdT | 2172 | CUCCUCGAUGuAGUCGAcAdTsdT |
| AD-27586.1 | 1563 | ucGAcuAcAucGAGGAGGAdTsdT | 2173 | UCCUCCUCGAUGuAGUCGAdTsdT |
| AD-27587.1 | 1564 | cGAcuAcAucGAGGAGGAcdTsdT | 2174 | GUCCUCCUCGAUGuAGUCGdTsdT |
| AD-27588.1 | 1565 | GAcuAcAucGAGGAGGAcudTsdT | 2175 | AGUCCUCCUCGAUGuAGUCdTsdT |
| AD-27620.1 | 1566 | cAcAcAGcuccAccAGcuGdTsdT | 2176 | cAGCUGGUGGAGCUGUGUGdTsdT |
| AD-27621.1 | 1567 | AuGGGGAcccGuGuccAcudTsdT | 2177 | AGUGGAcACGGGUCCCcAUdTsdT |
| AD-27622.1 | 1568 | cAcGuccucAcAGGcuGcAdTsdT | 2178 | UGcAGCCUGUGAGGACGUGdTsdT |
| AD-27623.1 | 1569 | AcGuccucAcAGGcuGcAGdTsdT | 2179 | CUGcAGCCUGUGAGGACGUdTsdT |
| AD-27624.1 | 1570 | GuccucAcAGGcuGcAGcudTsdT | 2180 | AGCUGcAGCCUGUGAGGACdTsdT |
| AD-27625.1 | 1571 | uccucAcAGGcuGcAGcucdTsdT | 2181 | GAGCUGcAGCCUGUGAGGAdTsdT |
| AD-27626.1 | 1572 | ucAcAGGcuGcAGcucccAdTsdT | 2182 | UGGGAGCUGcAGCCUGUGAdTsdT |
| AD-27627.1 | 1573 | AcAGGcuGcAGcucccAcudTsdT | 2183 | AGUGGGAGCUGcAGCCUGUdTsdT |
| AD-27628.1 | 1574 | AcuGGGAGGuGGAGGAccudTsdT | 2184 | AGGUCCUCcACCUCCcAGUdTsdT |
| AD-27629.1 | 1575 | cuGGGAGGuGGAGGAccuudTsdT | 2185 | AAGGUCCUCcACCUCCcAGdTsdT |
| AD-27630.1 | 1576 | uGGGAGGuGGAGGAccuuGdTsdT | 2186 | cAAGGUCCUCcACCUCCcAdTsdT |
| AD-27631.1 | 1577 | GAGGuGGAGGAccuuGGcAdTsdT | 2187 | UGCcAAGGUCCUCcACCUCdTsdT |
| AD-27632.1 | 1578 | AGGuGGAGGAccuuGGcAcdTsdT | 2188 | GUGCcAAGGUCCUCcACCUdTsdT |
| AD-27633.1 | 1579 | uGGAGGAccuuGGcAcccAdTsdT | 2189 | UGGGUGCcAAGGUCCUCcAdTsdT |
| AD-27634.1 | 1580 | GAGGAccuuGGcAcccAcAdTsdT | 2190 | UGUGGGUGCcAAGGUCCUCdTsdT |
| AD-27635.1 | 1581 | AGGAccuuGGcAcccAcAAdTsdT | 2191 | UUGUGGGUGCcAAGGUCCUdTsdT |
| AD-27636.1 | 1582 | GGAccuuGGcAcccAcAAGdTsdT | 2192 | CUUGUGGGUGCcAAGGUCCdTsdT |
| AD-27637.1 | 1583 | cAcAAGccGccuGuGcuGAdTsdT | 2193 | UcAGcAcAGGCGGCUUGUGdTsdT |
| AD-27638.1 | 1584 | AcAAGccGccuGuGcuGAGdTsdT | 2194 | CUcAGcAcAGGCGGCUUGUdTsdT |
| AD-27639.1 | 1585 | uGuGcuGAGGccAcGAGGudTsdT | 2195 | ACCUCGUGGCCUcAGcAcAdTsdT |
| AD-27640.1 | 1586 | cAcGAGGucAGcccAAccAdTsdT | 2196 | UGGUUGGGCUGACCUCGUGdTsdT |
| AD-27641.1 | 1587 | AcGAGGucAGcccAAccAGdTsdT | 2197 | CUGGUUGGGCUGACCUCGUdTsdT |
| AD-27642.1 | 1588 | GAGGucAGcccAAccAGuGdTsdT | 2198 | cACUGGUUGGGCUGACCUCdTsdT |
| AD-27643.1 | 1589 | AcAGGGAGGccAGcAuccAdTsdT | 2199 | UGGAUGCUGGCCUCCCUGUdTsdT |
| AD-27644.1 | 1590 | GAGGccAGcAuccAcGcuudTsdT | 2200 | AAGCGUGGAUGCUGGCCUCdTsdT |
| AD-27645.1 | 1591 | AGGccAGcAuccAcGcuucdTsdT | 2201 | GAAGCGUGGAUGCUGGCCUdTsdT |
| AD-27646.1 | 1592 | GccAGcAuccAcGcuuccudTsdT | 2202 | AGGAAGCGUGGAUGCUGGCdTsdT |
| AD-27647.1 | 1593 | AGcAuccAcGcuuccuGcudTsdT | 2203 | AGcAGGAAGCGUGGAUGCUdTsdT |
| AD-27648.1 | 1594 | GcAuccAcGcuuccuGcuGdTsdT | 2204 | cAGcAGGAAGCGUGGAUGCdTsdT |
| AD-27649.1 | 1595 | uccAcGcuuccuGcuGccAdTsdT | 2205 | UGGcAGcAGGAAGCGUGGAdTsdT |
| AD-27650.1 | 1596 | ccAcGcuuccuGcuGccAudTsdT | 2206 | AUGGcAGcAGGAAGCGUGGdTsdT |
| AD-27651.1 | 1597 | cAcGcuuccuGcuGccAuGdTsdT | 2207 | cAUGGcAGcAGGAAGCGUGdTsdT |
| AD-27652.1 | 1598 | uuccuGcuGccAuGccccAdTsdT | 2208 | UGGGGcAUGGcAGcAGGAAdTsdT |
| AD-27653.1 | 1599 | ccAuGccccAGGucuGGAAdTsdT | 2209 | UUCcAGACCUGGGGcAUGGdTsdT |
| AD-27654.1 | 1600 | cAuGccccAGGucuGGAAudTsdT | 2210 | AUUCcAGACCUGGGGcAUGdTsdT |
| AD-27655.1 | 1601 | AuGccccAGGucuGGAAuGdTsdT | 2211 | cAUUCcAGACCUGGGGcAUdTsdT |
| AD-27656.1 | 1602 | GccccAGGucuGGAAuGcAdTsdT | 2212 | UGcAUUCcAGACCUGGGGCdTsdT |
| AD-27657.1 | 1603 | ccccAGGucuGGAAuGcAAdTsdT | 2213 | UUGcAUUCcAGACCUGGGGdTsdT |
| AD-27658.1 | 1604 | ccAGGucuGGAAuGcAAAGdTsdT | 2214 | CUUUGcAUUCcAGACCUGGdTsdT |
| AD-27659.1 | 1605 | cAGGucuGGAAuGcAAAGudTsdT | 2215 | ACUUUGcAUUCcAGACCUGdTsdT |
| AD-27660.1 | 1606 | AGGucuGGAAuGcAAAGucdTsdT | 2216 | GACUUUGcAUUCcAGACCUdTsdT |
| AD-27661.1 | 1607 | GGucuGGAAuGcAAAGucAdTsdT | 2217 | UGACUUUGcAUUCcAGACCdTsdT |
| AD-27662.1 | 1608 | GucuGGAAuGcAAAGucAAdTsdT | 2218 | UUGACUUUGcAUUCcAGACdTsdT |
| AD-27663.1 | 1609 | ucuGGAAuGcAAAGucAAGdTsdT | 2219 | CUUGACUUUGcAUUCcAGAdTsdT |
| AD-27664.1 | 1610 | uGGAAuGcAAAGucAAGGAdTsdT | 2220 | UCCUUGACUUUGcAUUCcAdTsdT |
| AD-27665.1 | 1611 | GGAAuGcAAAGucAAGGAGdTsdT | 2221 | CUCCUUGACUUUGcAUUCCdTsdT |
| AD-27666.1 | 1612 | AAuGcAAAGucAAGGAGcAdTsdT | 2222 | UGCUCCUUGACUUUGcAUUdTsdT |
| AD-27667.1 | 1613 | AuGcAAAGucAAGGAGcAudTsdT | 2223 | AUGCUCCUUGACUUUGcAUdTsdT |
| AD-27668.1 | 1614 | uGcAAAGucAAGGAGcAuGdTsdT | 2224 | cAUGCUCCUUGACUUUGcAdTsdT |
| AD-27669.1 | 1615 | cAAAGucAAGGAGcAuGGAdTsdT | 2225 | UCcAUGCUCCUUGACUUUGdTsdT |
| AD-27670.1 | 1616 | AAAGucAAGGAGcAuGGAAdTsdT | 2226 | UUCcAUGCUCCUUGACUUUdTsdT |
| AD-27671.1 | 1617 | AAGucAAGGAGcAuGGAAudTsdT | 2227 | AUUCcAUGCUCCUUGACUUdTsdT |
| AD-27672.1 | 1618 | AuGGAAucccGGccccucAdTsdT | 2228 | UGAGGGGCCGGGAUUCcAUdTsdT |
| AD-27673.1 | 1619 | AcAGGcAGcAccAGcGAAGdTsdT | 2229 | CUUCGCUGGUGCUGCCUGUdTsdT |
| AD-27674.1 | 1620 | cAGccGuuGccAucuGcuGdTsdT | 2230 | cAGcAGAUGGcAACGGCUGdTsdT |
| AD-27675.1 | 1621 | GuuGccAucuGcuGccGGAdTsdT | 2231 | UCCGGcAGcAGAUGGcAACdTsdT |
| AD-27676.1 | 1622 | uuGccAucuGcuGccGGAGdTsdT | 2232 | CUCCGGcAGcAGAUGGcAAdTsdT |
| AD-27677.1 | 1623 | cucccAGGAGcuccAGuGAdTsdT | 2233 | UcACUGGAGCUCCUGGGAGdTsdT |
| AD-27678.1 | 1624 | ucccAGGAGcuccAGuGAcdTsdT | 2234 | GUcACUGGAGCUCCUGGGAdTsdT |
| AD-27679.1 | 1625 | cccAGGAGcuccAGuGAcAdTsdT | 2235 | UGUcACUGGAGCUCCUGGGdTsdT |
| AD-27680.1 | 1626 | ccAGGAGcuccAGuGAcAGdTsdT | 2236 | CUGUcACUGGAGCUCCUGGdTsdT |
| AD-27681.1 | 1627 | AGcuccAGuGAcAGccccAdTsdT | 2237 | UGGGGCUGUcACUGGAGCUdTsdT |
| AD-27682.1 | 1628 | GcuccAGuGAcAGccccAudTsdT | 2238 | AUGGGGCUGUcACUGGAGCdTsdT |
| AD-27683.1 | 1629 | cuccAGuGAcAGccccAucdTsdT | 2239 | GAUGGGGCUGUcACUGGAGdTsdT |
| AD-27684.1 | 1630 | cAGuGAcAGccccAucccAdTsdT | 2240 | UGGGAUGGGGCUGUcACUGdTsdT |
| AD-27685.1 | 1631 | AGuGAcAGccccAucccAGdTsdT | 2241 | CUGGGAUGGGGCUGUcACUdTsdT |
| AD-27686.1 | 1632 | uGAcAGccccAucccAGGAdTsdT | 2242 | UCCUGGGAUGGGGCUGUcAdTsdT |
| AD-27687.1 | 1633 | GAcAGccccAucccAGGAudTsdT | 2243 | AUCCUGGGAUGGGGCUGUCdTsdT |
| AD-27688.1 | 1634 | AcAGccccAucccAGGAuGdTsdT | 2244 | cAUCCUGGGAUGGGGCUGUdTsdT |
| AD-27689.1 | 1635 | GGGcuGGGGcuGAGcuuuAdTsdT | 2245 | uAAAGCUcAGCCCcAGCCCdTsdT |
| AD-27690.1 | 1636 | GGcuGGGGcuGAGcuuuAAdTsdT | 2246 | UuAAAGCUcAGCCCcAGCCdTsdT |
| AD-27691.1 | 1637 | GcuGGGGcuGAGcuuuAAAdTsdT | 2247 | UUuAAAGCUcAGCCCcAGCdTsdT |
| AD-27692.1 | 1638 | GGcuGAGcuuuAAAAuGGudTsdT | 2248 | ACcAUUUuAAAGCUcAGCCdTsdT |
| AD-27693.1 | 1639 | GcuGAGcuuuAAAAuGGuudTsdT | 2249 | AACcAUUUuAAAGCUcAGCdTsdT |
| AD-27694.1 | 1640 | cuGAGcuuuAAAAuGGuucdTsdT | 2250 | GAACcAUUUuAAAGCUcAGdTsdT |
| AD-27695.1 | 1641 | GuGGAGGuGccAGGAAGcudTsdT | 2251 | AGCUUCCUGGcACCUCcACdTsdT |
| AD-27696.1 | 1642 | uGGAGGuGccAGGAAGcucdTsdT | 2252 | GAGCUUCCUGGcACCUCcAdTsdT |
| AD-27697.1 | 1643 | AGGuGccAGGAAGcucccudTsdT | 2253 | AGGGAGCUUCCUGGcACCUdTsdT |
| AD-27698.1 | 1644 | ucAcuGuGGGGcAuuucAcdTsdT | 2254 | GUGAAAUGCCCcAcAGUGAdTsdT |
| AD-27699.1 | 1645 | AcuGuGGGGcAuuucAccAdTsdT | 2255 | UGGUGAAAUGCCCcAcAGUdTsdT |
| AD-27700.1 | 1646 | cuGuGGGGcAuuucAccAudTsdT | 2256 | AUGGUGAAAUGCCCcAcAGdTsdT |
| AD-27701.1 | 1647 | uGuGGGGcAuuucAccAuudTsdT | 2257 | AAUGGUGAAAUGCCCcAcAdTsdT |
| AD-27702.1 | 1648 | uGcuGccAGcuGcucccAAdTsdT | 2258 | UUGGGAGcAGCUGGcAGcAdTsdT |
| AD-27703.1 | 1649 | cuuuuAuuGAGcucuuGuudTsdT | 2259 | AAcAAGAGCUcAAuAAAAGdTsdT |
| AD-27704.1 | 1650 | GucuccAccAAGGAGGcAGdTsdT | 2260 | CUGCCUCCUUGGUGGAGACdTsdT |
| AD-27705.1 | 1651 | cuccAccAAGGAGGcAGGAdTsdT | 2261 | UCCUGCCUCCUUGGUGGAGdTsdT |
| AD-27706.1 | 1652 | uccAccAAGGAGGcAGGAudTsdT | 2262 | AUCCUGCCUCCUUGGUGGAdTsdT |
| AD-27707.1 | 1653 | ccAccAAGGAGGcAGGAuudTsdT | 2263 | AAUCCUGCCUCCUUGGUGGdTsdT |
| AD-27708.1 | 1654 | AccAAGGAGGcAGGAuucudTsdT | 2264 | AGAAUCCUGCCUCCUUGGUdTsdT |
| AD-27709.1 | 1655 | ccAAGGAGGcAGGAuucuudTsdT | 2265 | AAGAAUCCUGCCUCCUUGGdTsdT |
| AD-27710.1 | 1656 | cAAGGAGGcAGGAuucuucdTsdT | 2266 | GAAGAAUCCUGCCUCCUUGdTsdT |
| AD-27711.1 | 1657 | GGAGGcAGGAuucuucccAdTsdT | 2267 | UGGGAAGAAUCCUGCCUCCdTsdT |
| AD-27712.1 | 1658 | GAGGcAGGAuucuucccAudTsdT | 2268 | AUGGGAAGAAUCCUGCCUCdTsdT |
| AD-27713.1 | 1659 | AGGcAGGAuucuucccAuGdTsdT | 2269 | cAUGGGAAGAAUCCUGCCUdTsdT |
| AD-27838.1 | 1660 | uGcuGAuGGcccucAucucdTsdT | 2270 | GAGAUGAGGGCcAUcAGcAdTsdT |
| AD-27839.1 | 1661 | cuGAuGGcccucAucuccAdTsdT | 2271 | UGGAGAUGAGGGCcAUcAGdTsdT |
| AD-27840.1 | 1662 | uGAuGGcccucAucuccAGdTsdT | 2272 | CUGGAGAUGAGGGCcAUcAdTsdT |
| AD-27841.1 | 1663 | AuGGcccucAucuccAGcudTsdT | 2273 | AGCUGGAGAUGAGGGCcAUdTsdT |
| AD-27842.1 | 1664 | AGcuuucuGGAuGGcAucudTsdT | 2274 | AGAUGCcAUCcAGAAAGCUdTsdT |
| AD-27843.1 | 1665 | GcuuucuGGAuGGcAucuAdTsdT | 2275 | uAGAUGCcAUCcAGAAAGCdTsdT |
| AD-27844.1 | 1666 | cuuucuGGAuGGcAucuAGdTsdT | 2276 | CuAGAUGCcAUCcAGAAAGdTsdT |
| AD-27845.1 | 1667 | cuGGAuGGcAucuAGccAGdTsdT | 2277 | CUGGCuAGAUGCcAUCcAGdTsdT |
| AD-27846.1 | 1668 | uGGAuGGcAucuAGccAGAdTsdT | 2278 | UCUGGCuAGAUGCcAUCcAdTsdT |
| AD-27847.1 | 1669 | GGAuGGcAucuAGccAGAGdTsdT | 2279 | CUCUGGCuAGAUGCcAUCCdTsdT |
| AD-27848.1 | 1670 | uGGcAucuAGccAGAGGcudTsdT | 2280 | AGCCUCUGGCuAGAUGCcAdTsdT |
| AD-27849.1 | 1671 | GGcAucuAGccAGAGGcuGdTsdT | 2281 | cAGCCUCUGGCuAGAUGCCdTsdT |
| AD-27850.1 | 1672 | cAucuAGccAGAGGcuGGAdTsdT | 2282 | UCcAGCCUCUGGCuAGAUGdTsdT |
| AD-27851.1 | 1673 | ucuAGccAGAGGcuGGAGAdTsdT | 2283 | UCUCcAGCCUCUGGCuAGAdTsdT |
| AD-27852.1 | 1674 | cucuAuGccAGGcuGuGcudTsdT | 2284 | AGcAcAGCCUGGcAuAGAGdTsdT |
| AD-27853.1 | 1675 | ucuAuGccAGGcuGuGcuAdTsdT | 2285 | uAGcAcAGCCUGGcAuAGAdTsdT |
| AD-27854.1 | 1676 | ucucAGccAAcccGcuccAdTsdT | 2286 | UGGAGCGGGUUGGCUGAGAdTsdT |
| AD-27855.1 | 1677 | ucAGccAAcccGcuccAcudTsdT | 2287 | AGUGGAGCGGGUUGGCUGAdTsdT |
| AD-27856.1 | 1678 | cAGccAAcccGcuccAcuAdTsdT | 2288 | uAGUGGAGCGGGUUGGCUGdTsdT |
| AD-27857.1 | 1679 | AGccAAcccGcuccAcuAcdTsdT | 2289 | GuAGUGGAGCGGGUUGGCUdTsdT |
| AD-27858.1 | 1680 | uGccuGccAAGcucAcAcAdTsdT | 2290 | UGUGUGAGCUUGGcAGGcAdTsdT |
| AD-27859.1 | 1681 | GccuGccAAGcucAcAcAGdTsdT | 2291 | CUGUGUGAGCUUGGcAGGCdTsdT |
| AD-27860.1 | 1682 | cuGccAAGcucAcAcAGcAdTsdT | 2292 | UGCUGUGUGAGCUUGGcAGdTsdT |
| AD-27861.1 | 1683 | uGccAAGcucAcAcAGcAGdTsdT | 2293 | CUGCUGUGUGAGCUUGGcAdTsdT |
| AD-27862.1 | 1684 | ccAAGcucAcAcAGcAGGAdTsdT | 2294 | UCCUGCUCUGUGAGCUUGGdTsdT |
| AD-27863.1 | 1685 | cAAGcucAcAcAGcAGGAAdTsdT | 2295 | UUCCUGCUGUGUGAGCUUGdTsdT |
| AD-27864.1 | 1686 | AAGcucAcAcAGcAGGAAcdTsdT | 2296 | GUUCCUGCUGUGUGAGCUUdTsdT |
| AD-27865.1 | 1687 | AGcucAcAcAGcAGGAAcudTsdT | 2297 | AGUUCCUGCUGUGUGAGCUdTsdT |
| AD-27866.1 | 1688 | GcucAcAcAGcAGGAAcuGdTsdT | 2298 | cAGUUCCUGCUGUGUGAGCdTsdT |
| AD-27867.1 | 1689 | cucAcAcAGcAGGAAcuGAdTsdT | 2299 | UcAGUUCCUGCUGUGUGAGdTsdT |
| AD-27868.1 | 1690 | ucAcAcAGcAGGAAcuGAGdTsdT | 2300 | CUcAGUUCCUGCUGUGUGAdTsdT |
| AD-27869.1 | 1691 | cAcAGcAGGAAcuGAGccAdTsdT | 2301 | UGGCUcAGUUCCUGCUGUGdTsdT |
| AD-27870.1 | 1692 | AcAGcAGGAAcuGAGccAGdTsdT | 2302 | CUGGCUcAGUUCCUGCUGUdTsdT |
| AD-27871.1 | 1693 | cAGcAGGAAcuGAGccAGAdTsdT | 2303 | UCUGGCUcAGUUCCUGCUGdTsdT |
| AD-27872.1 | 1694 | AGcAGGAAcuGAGccAGAAdTsdT | 2304 | UUCUGGCUcAGUUCCUGCUdTsdT |
| AD-27873.1 | 1695 | GcAGGAAcuGAGccAGAAAdTsdT | 2305 | UUUCUGGCUcAGUUCCUGCdTsdT |
| AD-27874.1 | 1696 | cAGGAAcuGAGccAGAAAccTsdT | 2306 | GUUUCUGGCUcAGUUCCUGdTsdT |
| AD-27875.1 | 1697 | cucuGAAGccAAGccucuudTsdT | 2307 | AAGAGGCUUGGCUUcAGAGdTsdT |
| AD-27876.1 | 1698 | ucuGAAGccAAGccucuucdTsdT | 2308 | GAAGAGGCUUGGCUUcAGAdTsdT |
| AD-27877.1 | 1699 | cuGAAGccAAGccucuucudTsdT | 2309 | AGAAGAGGCUUGGCUUcAGdTsdT |
| AD-27878.1 | 1700 | uGAAGccAAGccucuucuudTsdT | 2310 | AAGAAGAGGCUUGGCUUcAdTsdT |
| AD-27879.1 | 1701 | GAAGccAAGccucuucuuAdTsdT | 2311 | uAAGAAGAGGCUUGGCUUCdTsdT |
| AD-27880.1 | 1702 | AAGccAAGccucuucuuAcdTsdT | 2312 | GuAAGAAGAGGCUUGGCUUdTsdT |
| AD-27881.1 | 1703 | GccAAGccucuucuuAcuudTsdT | 2313 | AAGuAAGAAGAGGCUUGGCdTsdT |
| AD-27882.1 | 1704 | GGuAAcAGuGAGGcuGGGAdTsdT | 2314 | UCCcAGCCUcACUGUuACCdTsdT |
| AD-27883.1 | 1705 | GuAAcAGuGAGGcuGGGAAdTsdT | 2315 | UUCCcAGCCUcACUGUuACdTsdT |
| AD-27884.1 | 1706 | uAAcAGuGAGGcuGGGAAGdTsdT | 2316 | CUUCCcAGCCUcACUGUuAdTsdT |
| AD-27885.1 | 1707 | AGuGAGGcuGGGAAGGGGAdTsdT | 2317 | UCCCCUUCCcAGCCUcACUdTsdT |
| AD-27886.1 | 1708 | GuGAGGcuGGGAAGGGGAAdTsdT | 2318 | UUCCCCUUCCcAGCCUcACdTsdT |
| AD-27887.1 | 1709 | uGAGGcuGGGAAGGGGAAcdTsdT | 2319 | GUUCCCCUUCCcAGCCUcAdTsdT |
| AD-27888.1 | 1710 | GAGGcuGGGAAGGGGAAcAdTsdT | 2320 | UGUUCCCCUUCCcAGCCUCdTsdT |
| AD-27889.1 | 1711 | AGGcuGGGAAGGGGAAcAcdTsdT | 2321 | GUGUUCCCCUUCCcAGCCUdTsdT |
| AD-27890.1 | 1712 | GGcuGGGAAGGGGAAcAcAdTsdT | 2322 | UGUGUUCCCCUUCCcAGCCdTsdT |
| AD-27891.1 | 1713 | GcuGGGAAGGGGAAcAcAGdTsdT | 2323 | CUGUGUUCCCCUUCCcAGCdTsdT |
| AD-27892.1 | 1714 | cuGGGAAGGGGAAcAcAGAdTsdT | 2324 | UCUGUGUUCCCCUUCCcAGdTsdT |
| AD-27893.1 | 1715 | uGGGAAGGGGAAcAcAGAccTsdT | 2325 | GUCUGUGUUCCCCUUCCcAdTsdT |
| AD-27894.1 | 1716 | GGAAGGGGAAcAcAGAccAdTsdT | 2326 | UGGUCUGUGUUCCCCUUCCdTsdT |
| AD-27895.1 | 1717 | GAAGGGGAAcAcAGAccAGdTsdT | 2327 | CUGGUCUGUGUUCCCCUUCdTsdT |
| AD-27896.1 | 1718 | AGGGGAAcAcAGAccAGGAdTsdT | 2328 | UCCUGGUCUGUGUUCCCCUdTsdT |
| AD-27897.1 | 1719 | GGGGAAcAcAGAccAGGAAdTsdT | 2329 | UUCCUGGUCUGUGUUCCCCdTsdT |
| AD-27898.1 | 1720 | GGGAAcAcAGAccAGGAAGdTsdT | 2330 | CUUCCUGGUCUGUGUUCCCdTsdT |
| AD-27899.1 | 1721 | GAAcAcAGAccAGGAAGcudTsdT | 2331 | AGCUUCCUGGUCUGUGUUCdTsdT |
| AD-27900.1 | 1722 | AAcAcAGAccAGGAAGcucdTsdT | 2332 | GAGCUUCCUGGUCUGUGUUdTsdT |
| AD-27901.1 | 1723 | AcAAcuGucccuccuuGAGdTsdT | 2333 | CUcAAGGAGGGAcAGUGGUdTsdT |
| AD-27902.1 | 1724 | AAcuGucccuccuuGAGcAdTsdT | 2334 | UGCUcAAGGAGGGAcAGUUdTsdT |
| AD-27903.2 | 1725 | uGucccuccuuGAGcAccAdTsdT | 2335 | UGGUGCUcAAGGAGGGAcAdTsdT |
| AD-27904.1 | 1726 | GucccuccuuGAGcAccAGdTsdT | 2336 | CUGGUGCUcAAGGAGGGACdTsdT |
| AD-27905.1 | 1727 | uccuuGAGcAccAGccccAdTsdT | 2337 | UGGGGCUGGUGCUcAAGGAdTsdT |
| AD-27906.1 | 1728 | AccAGccccAcccAAGcAAdTsdT | 2338 | UUGCUUGGGUGGGGCUGGUdTsdT |
| AD-27907.1 | 1729 | AGccccAcccAAGcAAGcAdTsdT | 2339 | UGCUUGCUUGGGUGGGGCUdTsdT |
| AD-27908.1 | 1730 | ccccAcccAAGcAAGcAGAdTsdT | 2340 | UCUGCUUGCUUGGGUGGGGdTsdT |
| AD-27909.1 | 1731 | cccAcccAAGcAAGcAGAcdTsdT | 2341 | GUCUGCUUGCUUGGGUGGGdTsdT |
| AD-27910.1 | 1732 | ccAcccAAGcAAGcAGAcAdTsdT | 2342 | UGUCUGCUUGCUUGGGUGGdTsdT |
| AD-27911.1 | 1733 | cAcccAAGcAAGcAGAcAudTsdT | 2343 | AUGUCUGCUUGCUUGGGUGdTsdT |
| AD-27912.1 | 1734 | AcccAAGcAAGcAGAcAuudTsdT | 2344 | AAUGUCUGCUUGCUUGGGUdTsdT |
| AD-27913.1 | 1735 | cccAAGcAAGcAGAcAuuudTsdT | 2345 | AAAUGUCUGCUUGCUUGGGdTsdT |
| AD-27914.1 | 1736 | ccAAGcAAGcAGAcAuuuAdTsdT | 2346 | uAAAUGUCUGCUUGCUUGGdTsdT |
| AD-27915.1 | 1737 | cAAGcAAGcAGAcAuuuAudTsdT | 2347 | AuAAAUGUCUGCUUGCUUGdTsdT |
| AD-27916.1 | 1738 | AAGcAAGcAGAcAuuuAucdTsdT | 2348 | GAuAAAUGUCUGCUUGCUUdTsdT |
| AD-27917.1 | 1739 | AGcAAGcAGAcAuuuAucudTsdT | 2349 | AGAuAAAUGUCUGCUUGCUdTsdT |
| AD-27918.1 | 1740 | GcAAGcAGAcAuuuAucuudTsdT | 2350 | AAGAuAAAUGUCUGCUUGCdTsdT |
| AD-27919.1 | 1741 | cAAGcAGAcAuuuAucuuudTsdT | 2351 | AAAGAuAAAUGUCUGCUUGdTsdT |
| AD-27920.1 | 1742 | AAGcAGAcAuuuAucuuuudTsdT | 2352 | AAAAGAuAAAUGUCUGCUUdTsdT |
| AD-27921.1 | 1743 | AGcAGAcAuuuAucuuuuGdTsdT | 2353 | cAAAAGAuAAAUGUCUGCUdTsdT |
| AD-27922.1 | 1744 | AGAcAuuuAucuuuuGGGudTsdT | 2354 | ACCcAAAAGAuAAAUGUCUdTsdT |
| AD-27923.1 | 1745 | GAcAuuuAucuuuuGGGucdTsdT | 2355 | GACCcAAAAGAuAAAUGUCdTsdT |
| AD-27924.1 | 1746 | AucuuuuGGGucuGuccucdTsdT | 2356 | GAGGAcAGACCcAAAAGAUdTsdT |
| AD-27925.1 | 1747 | ucuuuuGGGucuGuccucudTsdT | 2357 | AGAGGAcAGACCcAAAAGAdTsdT |
| AD-27926.1 | 1748 | cuuuuGGGucuGuccucucdTsdT | 2358 | GAGAGGAcAGACCcAAAAGdTsdT |
| AD-27927.1 | 1749 | uuuuGGGucuGuccucucudTsdT | 2359 | AGAGAGGAcAGACCcAAAAdTsdT |
| AD-27928.1 | 1750 | uuuGGGucuGuccucucuGdTsdT | 2360 | cAGAGAGGAcAGACCcAAAdTsdT |
| AD-27929.1 | 1751 | uuGGGucuGuccucucuGudTsdT | 2361 | AcAGAGAGGAcAGACCcAAdTsdT |
| AD-27930.1 | 1752 | uGGGucuGuccucucuGuudTsdT | 2362 | AAcAGAGAGGAcAGACCcAdTsdT |
| AD-28045.1 | 1753 | GGGucuGuccucucuGuuGdTsdT | 2363 | cAAcAGAGAGGAcAGACCCdTsdT |
| AD-28046.1 | 1754 | ucuGuccucucuGuuGccudTsdT | 2364 | AGGcAAcAGAGAGGAcAGAdTsdT |
| AD-28047.1 | 1755 | cuGuccucucuGuuGccuudTsdT | 2365 | AAGGcAAcAGAGAGGAcAGdTsdT |
| AD-28048.1 | 1756 | uGuccucucuGuuGccuuudTsdT | 2366 | AAAGGcAAcAGAGAGGAcAdTsdT |
| AD-28049.1 | 1757 | GuccucucuGuuGccuuuudTsdT | 2367 | AAAAGGcAAcAGAGAGGACdTsdT |
| AD-28050.1 | 1758 | AAGAuAuuuAuucuGGGuudTsdT | 2368 | AACCcAGAAuAAAuAUCUUdTsdT |
| AD-28051.1 | 1759 | AGAuAuuuAuucuGGGuuudTsdT | 2369 | AAACCcAGAAuAAAuAUCUdTsdT |
| AD-28052.1 | 1760 | GAuAuuuAuucuGGGuuuudTsdT | 2370 | AAAACCcAGAAuAAAuAUCdTsdT |
| AD-28053.1 | 1761 | cuGGcAccuAcGuGGuGGudTsdT | 2371 | ACcACcACGuAGGUGCcAGdTsdT |
| AD-28054.1 | 1762 | cuAcAGGcAGcAccAGcGAdTsdT | 2372 | UCGCUGGUGCUGCCUGuAGdTsdT |
| AD-28055.1 | 1763 | cAGGuGGAGGuGccAGGAAdTsdT | 2373 | UUCCUGGcACCUCcACCUGdTsdT |
| AD-28056.1 | 1764 | cucAcuGuGGGGcAuuucAdTsdT | 2374 | UGAAAUGCCCcAcAGUGAGdTsdT |
| AD-28057.1 | 1765 | cGuGccuGccAAGcucAcAdTsdT | 2375 | UGUGAGCUUGGcAGGcACGdTsdT |
| AD-28058.1 | 1766 | ccAAGGGAAGGGcAcGGuudTsdT | 2376 | AACCGUGCCCUUCCCUUGGdTsdT |
| AD-28059.1 | 1767 | cucuAGAccuGuuuuGcuudTsdT | 2377 | AAGcAAAAcAGGUCuAGAGdTsdT |
| AD-28060.1 | 1768 | cccuAGAccuGuuuuGcuudTsdT | 2378 | AAGcAAAAcAGGUCuAGGGdTsdT |
| AD-28061.1 | 1769 | GGuuGGcAGcuGuuuuGcAdTsdT | 2379 | UGcAAAAcAGCUGCcAACCdTsdT |
| AD-28062.1 | 1770 | GuuGGcAGcuGuuuuGcAGdTsdT | 2380 | CUGcAAAAcAGCUGCcAACdTsdT |
| AD-28063.1 | 1771 | uGGcAGcuGuuuuGcAGGAdTsdT | 2381 | UCCUGcAAAAcAGCUGCcAdTsdT |
| AD-28064.1 | 1772 | GGcAGcuGuuuuGcAGGAcdTsdT | 2382 | GUCCUGcAAAAcAGCUGCCdTsdT |
| AD-28065.1 | 1773 | GcAGcuGuuuuGcAGGAcudTsdT | 2383 | AGUCCUGcAAAAcAGCUGCdTsdT |
| AD-28066.1 | 1774 | ccuAcAcGGAuGGccAcAGdTsdT | 2384 | CUGUGGCcAUCCGUGuAGGdTsdT |
| AD-28067.1 | 1775 | GAuGAGGAGcuGcuGAGcudTsdT | 2385 | AGCUcAGcAGCUCCUcAUCdTsdT |
| AD-28068.1 | 1776 | GcuGcuGAGcuGcuccAGudTsdT | 2386 | ACUGGAGcAGCUcAGcAGCdTsdT |
| AD-28069.1 | 1777 | uGcuGAGcuGcuccAGuuudTsdT | 2387 | AAACUGGAGcAGCUcAGcAdTsdT |
| AD-28070.1 | 1778 | GcuGAGcuGcuccAGuuucdTsdT | 2388 | GAAACUGGAGcAGCUcAGCdTsdT |
| AD-28071.1 | 1779 | cuGAGcuGcuccAGuuucudTsdT | 2389 | AGAAACUGGAGcAGCUcAGdTsdT |
| AD-28072.1 | 1780 | AGcuGcuccAGuuucuccAdTsdT | 2390 | UGGAGAAACUGGAGcAGCUdTsdT |
| AD-28073.1 | 1781 | GcuGcuccAGuuucuccAGdTsdT | 2391 | CUGGAGAAACUGGAGcAGCdTsdT |
| AD-28074.1 | 1782 | uGcuccAGuuucuccAGGAdTsdT | 2392 | UCCUGGAGAAACUGGAGcAdTsdT |
| AD-28075.1 | 1783 | cuccAGuuucuccAGGAGudTsdT | 2393 | ACUCCUGGAGAAACUGGAGdTsdT |
| AD-28076.1 | 1784 | AGuuucuccAGGAGuGGGAdTsdT | 2394 | UCCcACUCCUGGAGAAACUdTsdT |
| AD-28077.1 | 1785 | uuucuccAGGAGuGGGAAGdTsdT | 2395 | CUUCCcACUCCUGGAGAAAdTsdT |
| AD-28078.1 | 1786 | GGuGucuAcGccAuuGccAdTsdT | 2396 | UGGcAAUGGCGuAGAcACCdTsdT |
| AD-28079.1 | 1787 | GuGucuAcGccAuuGccAGdTsdT | 2397 | CUGGcAAUGGCGuAGAcACdTsdT |
| AD-28080.1 | 1788 | GucuAcGccAuuGccAGGudTsdT | 2398 | ACCUGGcAAUGGCGuAGACdTsdT |
| AD-28081.1 | 1789 | ucuAcGccAuuGccAGGuGdTsdT | 2399 | cACCUGGcAAUGGCGuAGAdTsdT |
| AD-28082.1 | 1790 | AcGccAuuGccAGGuGcuGdTsdT | 2400 | cAGcACCUGGcAAUGGCGUdTsdT |
| AD-28083.1 | 1791 | cAuuGccAGGuGcuGccuGdTsdT | 2401 | cAGGcAGcACCUGGcAAUGdTsdT |
| AD-28084.1 | 1792 | cAAcuGcAGcGuccAcAcAdTsdT | 2402 | UGUGUGGACGCUGcAGUUGdTsdT |
| AD-28085.1 | 1793 | AAcuGcAGcGuccAcAcAGdTsdT | 2403 | CUGUGUGGACGCUGcAGUUdTsdT |
| AD-28086.1 | 1794 | cuGcAGcGuccAcAcAGcudTsdT | 2404 | AGCUGUGUGGACGCUGcAGdTsdT |
| AD-28087.1 | 1795 | uGcAGcGuccAcAcAGcucdTsdT | 2405 | GAGCUGUGUGGACGCUGcAdTsdT |
| AD-28088.1 | 1796 | cAGcGuccAcAcAGcuccAdTsdT | 2406 | UGGAGCUGUGUGGACGCUGdTsdT |
| AD-28089.1 | 1797 | AGcGuccAcAcAGcuccAcdTsdT | 2407 | GUGGAGCUGUGUGGACGCUdTsdT |
| AD-28090.1 | 1798 | cGuccAcAcAGcuccAccAdTsdT | 2408 | UGGUGGAGCUGUGUGGACGdTsdT |
| AD-28091.1 | 1799 | GuccAcAcAGcuccAccAGdTsdT | 2409 | CUGGUGGAGCUGUGUGGACdTsdT |
| AD-28092.1 | 1800 | ccAcAcAGcuccAccAGcudTsdT | 2410 | AGCUGGUGGAGCUGUGUGGdTsdT |
| AD-28093.1 | 1801 | cccAGGucuGGAAuGcAAAdTsdT | 2411 | UUUGcAUUCcAGACCUGGGdTsdT |
| AD-28094.1 | 1802 | cAGGuuGGcAGcuGuuuuGdTsdT | 2412 | cAAAAcAGCUGCcAACCUGdTsdT |
| AD-28095.1 | 1803 | cAGcuGuuuuGcAGGAcuGdTsdT | 2413 | cAGUCCUGcAAAAcAGCUGdTsdT |
| AD-28096.1 | 1804 | AGcuGuuuuGcAGGAcuGudTsdT | 2414 | AcAGUCCUGcAAAAcAGCUdTsdT |
| AD-28097.1 | 1805 | AuGAGGAGcuGcuGAGcuGdTsdT | 2415 | cAGCUcAGcAGCUCCUcAUdTsdT |
| AD-28098.1 | 1806 | cuGcuGAGcuGcuccAGuudTsdT | 2416 | AACUGGAGcAGCUcAGcAGdTsdT |
| AD-28099.1 | 1807 | uGAGcuGcuccAGuuucucdTsdT | 2417 | GAGAAACUGGAGcAGCUcAdTsdT |
| AD-28100.1 | 1808 | GcuccAGuuucuccAGGAGdTsdT | 2418 | CUCCUGGAGAAACUGGAGCdTsdT |
| AD-28101.1 | 1809 | uccAGuuucuccAGGAGuGdTsdT | 2419 | cACUCCUGGAGAAACUGGAdTsdT |
| AD-28102.1 | 1810 | GuuucuccAGGAGuGGGAAdTsdT | 2420 | UUCCcACUCCUGGAGAAACdTsdT |
| AD-28103.1 | 1811 | cGGGcccAcAAcGcuuuuGdTsdT | 2421 | cAAAAGCGUUGUGGGCCCGdTsdT |
| AD-28104.1 | 1812 | GuGAGGGuGucuAcGccAudTsdT | 2422 | AUGGCGuAGAcACCCUcACdTsdT |
| AD-28105.1 | 1813 | uGAGGGuGucuAcGccAuudTsdT | 2423 | AAUGGCGuAGAcACCCUcAdTsdT |
| AD-28106.1 | 1814 | uAcGccAuuGccAGGuGcudTsdT | 2424 | AGcACCUGGcAAUGGCGuAdTsdT |
| AD-28107.1 | 1815 | ccAuuGccAGGuGcuGccudTsdT | 2425 | AGGcAGcACCUGGcAAUGGdTsdT |
| AD-28108.1 | 1816 | uuGccAGGuGcuGccuGcudTsdT | 2426 | AGcAGGcAGcACCUGGcAAdTsdT |
| AD-28109.1 | 1817 | uGccAGGuGcuGccuGcuAdTsdT | 2427 | uAGcAGGcAGcACCUGGcAdTsdT |
| AD-28110.1 | 1818 | uuuuAuuGAGcucuuGuucdTsdT | 2428 | GAAcAAGAGCUcAAuAAAAdTsdT |
| AD-28111.1 | 1819 | uucuAGAccuGuuuuGcuudTsdT | 2429 | AAGCaAaAcAGGuCuAGAadTsdT |
| AD-28112.1 | 1820 | uucuAGAccuGuuuuGcuudTsdT | 2430 | GAGcAAAAcAGGUCuAGAAdTsdT |
| AD-28113.1 | 1821 | uucuAGAccuGuuuuGcuudTsdT | 2431 | AGGcAAAAcAGGUCuAGAAdTsdT |
| AD-28114.1 | 1822 | uucuAGAccuGuuuuGcuudTsdT | 2432 | AAGuAAAAcAGGUCuAGAAdTsdT |
| AD-28115.1 | 1823 | uucuAGAccuGuuuuGcuudTsdT | 2433 | AAGcAAAAuAGGUCuAGAAdTsdT |
| AD-28116.1 | 1824 | uucuAGAccuGuuuuGcuudTsdT | 2434 | AAGcAAAAcAGGUUuAGAAdTsdT |
| AD-28117.1 | 1825 | uucuAGAccuGuuuuGcuudTsdT | 2435 | UUCUaGaCcUGUuUuGcUudTsdT |
| AD-28118.1 | 1826 | cucuAGAccY1GuuuuGcuudTsdT | 2436 | AAGcAAAAcAGGUCuAGAAdTsdT |
| AD-28119.1 | 1827 | uucuAGAccuGuuuuGcuadTsdT | 2437 | AAGcAAAAcAGGUCuAGAAdTsdT |
| AD-28120.1 | 1828 | uucuAGAccaGuuuuGcuadTsdT | 2438 | AAGcAAAAcAGGUCuAGAAdTsdT |
| AD-28121.1 | 1829 | uucuAGAccY1GuuuuGcuadTsdT | 2439 | AAGcAAAAcAGGUCuAGAAdTsdT |
| AD-28122.1 | 1830 | GucuAGAccY1GuuuuGcuadTsdT | 2440 | AAGcAAAAcAGGUCuAGAAdTsdT |

TABLE 3
10 nM and 0.1 nM knockdown of PCSK9

| | Average % | | | |
|---|---|---|---|---|
| | message | | | |
| | remaining | Stdev | Average % message | Stdev |
| Duplex Name | (10 nM) | (10 nM) | remaining (0.1 nM) | (0.1 nM) |
| AD-27043-b1 | 54.5 | 1.4 | 103.1 | 8.6 |
| AD-27044-b1 | 25.5 | 8.4 | 80.4 | 10.8 |
| AD-27045-b1 | 15.6 | 8.3 | 40.6 | 5.1 |
| AD-27046-b1 | 22.1 | 2.9 | 77.1 | 8.2 |
| AD-27047-b1 | 54.3 | 22.5 | 106.6 | 18.7 |
| AD-27048-b1 | 26.3 | 8.6 | 85.5 | 8.8 |
| AD-27049-b1 | 32.6 | 7.8 | 79.0 | 7.7 |
| AD-27050-b1 | 30.9 | 7.1 | 59.5 | 8.0 |
| AD-27051-b1 | 51.5 | 9.2 | 113.6 | 4.7 |
| AD-27052-b1 | 66.4 | 21.6 | 105.1 | 10.0 |
| AD-27053-b1 | 78.8 | 13.7 | 111.5 | 5.5 |
| AD-27054-b1 | 17.8 | 0.1 | 69.0 | 5.2 |
| AD-27055-b1 | 71.4 | 23.8 | 113.3 | 6.4 |
| AD-27056-b1 | 72.9 | 4.0 | 110.1 | 4.0 |
| AD-27057-b1 | 80.0 | 9.7 | 105.8 | 9.6 |
| AD-27058-b1 | 89.3 | 5.8 | 112.2 | 13.7 |
| AD-27059-b1 | 86.6 | 6.9 | 122.9 | 6.6 |
| AD-27060-b1 | 87.9 | 1.2 | 112.6 | 9.7 |
| AD-27061-b1 | 34.3 | 3.6 | 94.1 | 6.4 |
| AD-27062-b1 | 69.7 | 10.4 | 107.6 | 2.1 |
| AD-27063-b1 | 91.2 | 9.7 | 120.7 | 2.9 |
| AD-27064-b1 | 15.1 | 4.2 | 40.6 | 1.2 |
| AD-27065-b1 | 64.5 | 3.6 | 116.3 | 1.4 |
| AD-27066-b1 | 83.9 | 10.5 | 104.4 | 4.1 |
| AD-27067-b1 | 34.2 | 10.3 | 76.7 | 3.0 |
| AD-27068-b1 | 35.4 | 2.3 | 76.1 | 2.6 |
| AD-27069-b1 | 82.3 | 4.5 | 98.5 | 3.1 |
| AD-27070-b1 | 14.8 | 2.4 | 36.1 | 0.9 |
| AD-27071-b1 | 82.4 | 18.4 | 110.7 | 3.3 |
| AD-27072-b1 | 85.6 | 3.2 | 112.2 | 1.7 |
| AD-27073-b1 | 20.1 | 3.1 | 50.7 | 1.5 |
| AD-27074-b1 | 78.9 | 24.4 | 101.1 | 11.0 |
| AD-27075-b1 | 53.1 | 13.4 | 87.1 | 2.1 |
| AD-27076-b1 | 18.9 | 1.0 | 64.1 | 0.8 |
| AD-27077-b1 | 93.1 | 2.9 | 101.6 | 0.2 |
| AD-27078-b1 | 38.1 | 9.5 | 102.5 | 0.0 |
| AD-27079-b1 | 7.2 | 1.7 | 42.0 | 8.2 |
| AD-27080-b1 | 34.5 | 4.9 | 71.4 | 0.9 |
| AD-27081-b1 | 16.5 | 2.8 | 40.6 | 1.1 |
| AD-27082-b1 | 27.0 | 2.3 | 67.8 | 1.8 |
| AD-27083-b1 | 21.4 | 5.6 | 59.3 | 1.2 |
| AD-27084-b1 | 67.4 | 8.0 | 107.4 | 14.7 |
| AD-27085-b1 | 67.2 | 1.5 | 99.7 | 0.0 |
| AD-27086-b1 | 107.3 | 9.9 | 125.0 | 11.9 |
| AD-27087-b1 | 83.6 | 4.2 | 103.6 | 7.9 |
| AD-27088-b1 | 64.9 | 5.7 | 99.6 | 5.6 |
| AD-27089-b1 | 91.0 | 20.5 | 109.9 | 3.2 |
| AD-27090-b1 | 16.2 | 1.9 | 33.5 | 2.6 |
| AD-27091-b1 | 14.3 | 4.2 | 27.9 | 1.9 |
| AD-27092-b1 | 63.5 | 4.9 | 104.5 | 8.7 |
| AD-27093-b1 | 77.0 | 1.2 | 101.6 | 0.7 |
| AD-27094-b1 | 55.0 | 5.4 | 93.3 | 4.8 |
| AD-27095-b1 | 90.8 | 2.1 | 98.5 | 0.2 |
| AD-27096-b1 | 80.5 | 2.9 | 102.2 | 0.5 |
| AD-27097-b1 | 96.8 | 2.0 | 92.1 | 7.4 |
| AD-27098-b1 | 43.3 | 1.3 | 97.2 | 1.2 |
| AD-27099-b1 | 26.4 | 0.1 | 51.3 | 2.5 |
| AD-27100-b1 | 90.8 | 7.5 | 108.0 | 17.9 |
| AD-27101-b1 | 98.3 | 25.4 | 122.0 | 6.0 |
| AD-27102-b1 | 15.3 | 3.2 | 39.2 | 1.2 |
| AD-27103-b1 | 43.0 | 7.6 | 71.7 | 3.0 |
| AD-27104-b1 | 57.0 | 16.1 | 99.1 | 9.1 |
| AD-27105-b1 | 66.6 | 27.0 | 97.0 | 14.1 |
| AD-27106-b1 | 24.8 | 1.3 | 82.6 | 17.0 |
| AD-27107-b1 | 84.4 | 10.0 | 115.8 | 10.5 |
| AD-27108-b1 | 88.3 | 2.0 | 110.7 | 2.7 |
| AD-27109-b1 | 32.8 | 2.3 | 69.5 | 1.4 |
| AD-27110-b1 | 13.7 | 3.5 | 24.4 | 3.7 |
| AD-27111-b1 | 73.4 | 0.1 | 103.1 | 1.8 |
| AD-27112-b1 | 11.1 | 1.9 | 54.8 | 0.9 |
| AD-27113-b1 | 26.4 | 1.7 | 81.0 | 3.2 |
| AD-27114-b1 | 74.5 | 6.1 | 94.4 | 8.5 |
| AD-27115-b1 | 59.0 | 4.4 | 102.0 | 3.2 |
| AD-27116-b1 | 93.1 | 5.6 | 126.0 | 2.2 |
| AD-27117-b1 | 22.7 | 1.6 | 62.4 | 7.5 |
| AD-27118-b1 | 61.5 | 15.3 | 105.0 | 10.8 |
| AD-27119-b1 | 21.4 | 1.6 | 48.2 | 0.8 |
| AD-27120-b1 | 71.9 | 0.4 | 88.3 | 2.6 |
| AD-27121-b1 | 86.4 | 8.7 | 83.1 | 6.1 |
| AD-27122-b1 | 97.7 | 1.8 | 104.8 | 7.2 |
| AD-27123-b1 | 107.7 | 13.5 | 112.8 | 1.4 |
| AD-27124-b1 | 87.6 | 2.6 | 103.4 | 1.3 |
| AD-27125-b1 | 41.2 | 0.3 | 64.0 | 12.3 |
| AD-27126-b1 | 85.8 | 8.1 | 100.9 | 1.7 |
| AD-27127-b1 | 64.9 | 5.3 | 93.1 | 17.9 |
| AD-27128-b1 | 99.8 | 4.6 | 115.5 | 15.8 |
| AD-27129-b1 | 82.2 | 15.0 | 109.8 | 14.7 |
| AD-27130-b1 | 91.1 | 3.3 | 84.2 | 5.8 |
| AD-27131-b1 | 88.2 | 1.7 | 101.3 | 11.6 |
| AD-27132-b1 | 89.2 | 13.8 | 77.4 | 15.1 |
| AD-27133-b1 | 64.1 | 10.6 | 100.7 | 13.0 |
| AD-27134-b1 | 97.8 | 0.6 | 95.2 | 3.0 |
| AD-27135-b1 | 80.5 | 24.9 | 93.0 | 9.5 |
| AD-27136-b1 | 85.0 | 18.0 | 87.3 | 8.9 |
| AD-27137-b1 | 77.7 | 7.3 | 95.3 | 7.2 |
| AD-27138-b1 | 21.5 | 0.4 | 72.0 | 0.3 |
| AD-27292-b1 | 25.5 | 5.8 | 54.5 | 2.1 |
| AD-27293-b1 | 61.5 | 14.4 | 85.8 | 7.4 |
| AD-27294-b1 | 84.4 | 20.5 | 112.5 | 28.0 |
| AD-27295-b1 | 90.7 | 32.9 | 92.4 | 7.3 |
| AD-27296-b1 | 88.7 | 22.4 | 96.4 | 0.3 |
| AD-27297-b1 | 91.4 | 22.2 | 110.2 | 5.8 |
| AD-27298-b1 | 111.5 | 34.0 | 100.8 | 12.0 |
| AD-27299-b1 | 76.8 | 19.6 | 93.5 | 5.6 |
| AD-27300-b1 | 92.2 | 37.2 | 93.1 | 7.8 |
| AD-27301-b1 | 16.4 | 2.9 | 34.0 | 2.1 |
| AD-27302-b1 | 56.0 | 5.1 | 79.9 | 5.9 |
| AD-27303-b1 | 100.1 | 25.3 | 94.9 | 7.2 |
| AD-27304-b1 | 77.8 | 2.0 | 100.0 | 3.3 |
| AD-27305-b1 | 64.9 | 6.4 | 82.6 | 9.4 |
| AD-27306-b1 | 72.2 | 12.2 | 112.9 | 12.8 |
| AD-27307-b1 | 107.5 | 19.0 | 90.0 | 6.0 |
| AD-27308-b1 | 104.1 | 13.3 | 89.2 | 37.6 |
| AD-27309-b1 | 111.4 | 15.9 | 92.3 | 0.5 |
| AD-27310-b1 | 104.6 | 5.2 | 98.9 | 8.9 |
| AD-27311-b1 | 103.7 | 10.7 | 94.7 | 2.2 |
| AD-27312-b1 | 94.8 | 19.0 | 88.2 | 0.1 |
| AD-27313-b1 | 86.8 | 6.4 | 88.9 | 3.1 |
| AD-27314-b1 | 96.0 | 1.1 | 94.4 | 1.7 |
| AD-27315-b1 | 87.7 | 9.7 | 93.3 | 5.4 |
| AD-27316-b1 | 106.9 | 10.0 | 87.9 | 7.6 |
| AD-27317-b1 | 83.3 | 7.8 | 86.2 | 5.6 |
| AD-27318-b1 | 97.2 | 2.9 | 98.4 | 8.3 |
| AD-27319-b1 | 94.5 | 11.6 | 86.7 | 6.6 |
| AD-27320-b1 | 95.3 | 15.7 | 88.4 | 8.7 |
| AD-27321-b1 | 88.0 | 12.5 | 88.8 | 0.4 |
| AD-27322-b1 | 108.6 | 6.3 | 89.8 | 1.8 |
| AD-27323-b1 | 113.8 | 5.4 | 97.0 | 5.8 |
| AD-27324-b1 | 122.4 | 5.8 | 97.1 | 3.6 |
| AD-27325-b1 | 114.2 | 4.7 | 97.9 | 3.4 |
| AD-27326-b1 | 30.4 | 0.2 | 60.2 | 3.0 |
| AD-27327-b1 | 120.9 | 11.6 | 96.1 | 3.5 |
| AD-27328-b1 | 91.8 | 13.3 | 104.4 | 21.9 |
| AD-27329-b1 | 84.6 | 17.1 | 98.0 | 4.4 |
| AD-27330-b1 | 90.1 | 6.7 | 91.6 | 1.2 |
| AD-27331-b1 | 102.0 | 1.6 | 106.9 | 8.5 |
| AD-27332-b1 | 97.4 | 6.5 | 92.9 | 0.8 |
| AD-27333-b1 | 82.4 | 2.3 | 100.0 | 6.0 |
| AD-27334-b1 | 82.6 | 8.8 | 93.8 | 2.5 |
| AD-27335-b1 | 101.6 | 0.9 | 97.2 | 3.4 |
| AD-27336-b1 | 149.9 | 19.2 | 92.5 | 5.7 |
| AD-27337-b1 | 129.1 | 1.4 | 96.1 | 6.0 |
| AD-27338-b1 | 120.2 | 2.8 | 100.7 | 10.7 |
| AD-27339-b1 | 108.0 | 0.2 | 94.2 | 6.3 |
| AD-27340-b1 | 72.2 | 0.8 | 81.7 | 4.3 |
| AD-27341-b1 | 85.5 | 7.8 | 89.9 | 0.7 |
| AD-27342-b1 | 28.4 | 4.3 | 54.2 | 7.7 |
| AD-27343-b1 | 44.4 | 5.9 | 80.1 | 4.6 |
| AD-27344-b1 | 64.4 | 4.5 | 95.7 | 2.0 |
| AD-27345-b1 | 52.2 | 4.3 | 92.8 | 0.8 |
| AD-27346-b1 | 56.2 | 9.4 | 85.6 | 5.9 |
| AD-27347-b1 | 31.0 | 3.4 | 77.5 | 0.1 |
| AD-27348-b1 | 93.0 | 9.4 | 85.4 | 4.5 |
| AD-27349-b1 | 25.0 | 1.9 | 36.9 | 1.1 |
| AD-27350-b1 | 31.0 | 6.9 | 59.2 | 3.1 |
| AD-27351-b1 | 39.6 | 1.5 | 59.2 | 4.3 |
| AD-27352-b1 | 33.6 | 3.4 | 58.1 | 1.9 |
| AD-27353-b1 | 23.6 | 2.1 | 31.7 | 0.8 |
| AD-27354-b1 | 97.4 | 4.1 | 93.4 | 12.8 |
| AD-27355-b1 | 47.3 | 3.1 | 60.0 | 0.6 |
| AD-27356-b1 | 102.4 | 4.1 | 99.6 | 4.0 |
| AD-27357-b1 | 55.2 | 2.4 | 86.3 | 7.7 |
| AD-27358-b1 | 83.4 | 6.4 | 94.9 | 0.4 |
| AD-27359-b1 | 84.5 | 4.8 | 93.8 | 2.6 |
| AD-27360-b1 | 101.8 | 8.1 | 96.4 | 3.1 |
| AD-27361-b1 | 36.0 | 8.1 | 77.2 | 0.9 |
| AD-27362-b1 | 40.3 | 0.6 | 79.5 | 5.3 |
| AD-27363-b1 | 83.0 | 3.9 | 139.4 | 66.7 |
| AD-27364-b1 | 112.0 | 3.8 | 100.1 | 2.8 |
| AD-27365-b1 | 95.0 | 0.3 | 98.0 | 6.8 |
| AD-27366-b1 | 113.6 | 4.0 | 96.9 | 5.1 |
| AD-27367-b1 | 98.3 | 1.8 | 90.4 | 4.5 |
| AD-27368-b1 | 28.4 | 0.2 | 33.1 | 0.8 |
| AD-27369-b1 | 27.6 | 3.7 | 57.6 | 0.3 |
| AD-27370-b1 | 43.4 | 6.9 | 86.6 | 1.4 |
| AD-27371-b1 | 20.9 | 2.0 | 59.1 | 8.0 |
| AD-27372-b1 | 76.5 | 0.1 | 98.3 | 4.7 |
| AD-27373-b1 | 102.3 | 7.8 | 102.2 | 3.3 |
| AD-27374-b1 | 133.2 | 0.5 | 98.4 | 7.1 |
| AD-27375-b1 | 91.8 | 12.3 | 98.6 | 0.1 |
| AD-27376-b1 | 27.1 | 1.9 | 53.3 | 4.4 |
| AD-27377-b1 | 98.4 | 5.9 | 96.4 | 3.0 |
| AD-27378-b1 | 73.4 | 7.3 | 87.9 | 1.8 |
| AD-27379-b1 | 109.9 | 4.1 | 100.6 | 2.1 |
| AD-27380-b1 | 111.4 | 8.8 | 99.0 | 15.3 |
| AD-27381-b1 | 77.3 | 13.2 | 91.5 | 2.8 |
| AD-27382-b1 | 84.1 | 7.0 | 91.9 | 0.8 |
| AD-27383-b1 | 89.4 | 4.0 | 98.5 | 2.7 |
| AD-27384-b1 | 96.3 | 13.0 | 107.0 | 24.8 |
| AD-27385-b1 | 89.8 | 24.8 | 92.9 | 2.6 |
| AD-27386-b1 | 85.8 | 28.9 | 116.5 | 35.5 |
| AD-27387-b1 | 25.2 | 2.5 | 77.3 | 0.5 |
| AD-27493-b1 | 87.3 | 13.8 | 86.0 | 8.7 |
| AD-27494-b1 | 51.9 | 11.4 | 85.3 | 17.1 |
| AD-27495-b1 | 88.7 | 17.3 | 99.1 | 15.9 |
| AD-27496-b1 | 84.7 | 1.5 | 91.0 | 2.1 |
| AD-27497-b1 | 87.7 | 8.6 | 111.0 | 18.0 |
| AD-27498-b1 | 61.7 | 3.9 | 100.9 | 8.5 |
| AD-27499-b1 | 94.7 | 12.3 | 106.6 | 8.0 |
| AD-27500-b1 | 103.7 | 14.4 | 126.8 | 18.1 |
| AD-27501-b1 | 52.8 | 10.8 | 93.0 | 20.3 |
| AD-27502-b1 | 108.5 | 27.1 | 116.1 | 16.9 |
| AD-27503-b1 | 80.5 | 23.9 | 99.6 | 17.9 |
| AD-27504-b1 | 87.9 | 27.5 | 106.9 | 13.2 |
| AD-27505-b1 | 97.3 | 2.1 | 96.1 | 1.8 |
| AD-27506-b1 | 100.9 | 15.5 | 86.3 | 0.3 |
| AD-27507-b1 | 89.6 | 6.4 | 93.5 | 7.9 |
| AD-27508-b1 | 83.9 | 0.8 | 89.6 | 4.5 |
| AD-27509-b1 | 35.8 | 5.2 | 61.5 | 4.7 |
| AD-27510-b1 | 41.0 | 5.6 | 70.8 | 3.9 |
| AD-27511-b1 | 75.6 | 7.0 | 98.1 | 6.9 |
| AD-27512-b1 | 50.3 | 0.6 | 99.5 | 7.4 |
| AD-27513-b1 | 20.4 | 0.5 | 73.5 | 2.3 |
| AD-27514-b1 | 88.5 | 3.5 | 110.8 | 3.4 |
| AD-27515-b1 | 7.7 | 0.0 | 16.7 | 0.4 |
| AD-27516-b1 | 21.4 | 1.9 | 84.4 | 3.0 |
| AD-27517-b1 | 59.1 | 7.9 | 94.7 | 12.2 |
| AD-27518-b1 | 110.5 | 12.2 | 87.5 | 11.7 |
| AD-27519-b1 | 13.6 | 1.1 | 38.4 | 5.9 |
| AD-27520-b1 | 89.6 | 7.2 | 113.0 | 20.0 |
| AD-27521-b1 | 99.8 | 1.0 | 118.7 | 12.1 |
| AD-27522-b1 | 41.2 | 2.8 | 91.9 | 0.1 |
| AD-27523-b1 | 44.0 | 3.3 | 101.7 | 7.4 |
| AD-27524-b1 | 83.0 | 3.9 | 106.0 | 22.1 |
| AD-27525-b1 | 107.9 | 17.1 | 115.0 | 6.9 |
| AD-27526-b1 | 58.7 | 6.0 | 99.7 | 14.5 |
| AD-27527-b1 | 32.8 | 1.7 | 83.9 | 3.8 |
| AD-27528-b1 | 84.3 | 4.5 | 94.7 | 6.2 |
| AD-27529-b1 | 98.8 | 8.9 | 99.1 | 13.7 |
| AD-27530-b1 | 28.7 | 2.5 | 79.3 | 1.1 |
| AD-27531-b1 | 98.8 | 3.9 | 106.1 | 9.2 |
| AD-27532-b1 | 17.3 | 1.3 | 37.5 | 2.0 |
| AD-27533-b1 | 91.9 | 1.4 | 106.6 | 13.7 |
| AD-27534-b1 | 24.5 | 2.2 | 59.0 | 0.5 |
| AD-27535-b1 | 103.7 | 3.6 | 108.5 | 7.1 |
| AD-27536-b1 | 106.6 | 2.6 | 117.6 | 6.2 |
| AD-27537-b1 | 32.7 | 0.7 | 80.1 | 6.2 |
| AD-27538-b1 | 13.1 | 1.1 | 26.7 | 1.5 |
| AD-27539-b1 | 32.3 | 1.2 | 79.5 | 8.7 |
| AD-27540-b1 | 95.5 | 6.6 | 100.2 | 2.6 |
| AD-27541-b1 | 85.1 | 2.1 | 118.8 | 11.2 |
| AD-27542-b1 | 54.9 | 5.4 | 91.0 | 1.7 |
| AD-27543-b1 | 78.4 | 6.1 | 105.4 | 2.4 |
| AD-27544-b1 | 58.6 | 1.7 | 102.4 | 9.7 |
| AD-27545-b1 | 102.1 | 9.0 | 102.4 | 4.9 |
| AD-27546-b1 | 104.3 | 1.8 | 121.4 | 9.4 |
| AD-27547-b1 | 58.1 | 16.7 | 108.7 | 8.9 |
| AD-27548-b1 | 102.7 | 4.5 | 110.4 | 0.4 |
| AD-27549-b1 | 70.9 | 4.9 | 114.6 | 12.2 |
| AD-27550-b1 | 12.1 | 1.3 | 58.8 | 7.1 |
| AD-27551-b1 | 54.9 | 13.3 | 89.8 | 8.9 |
| AD-27552-b1 | 12.6 | 2.2 | 61.5 | 6.1 |
| AD-27553-b1 | 19.9 | 1.8 | 63.8 | 5.9 |
| AD-27554-b1 | 35.6 | 3.2 | 89.5 | 6.9 |
| AD-27555-b1 | 112.6 | 7.4 | 101.5 | 5.1 |
| AD-27556-b1 | 9.4 | 0.7 | 28.1 | 0.5 |
| AD-27557-b1 | 77.0 | 25.6 | 99.4 | 12.7 |
| AD-27558-b1 | 101.1 | 21.4 | 82.6 | 8.0 |
| AD-27559-b1 | 117.4 | 7.8 | 111.1 | 6.7 |
| AD-27560-b1 | 110.2 | 0.8 | 110.3 | 6.9 |
| AD-27561-b1 | 103.6 | 15.7 | 120.2 | 3.1 |
| AD-27562-b1 | 107.2 | 1.3 | 103.2 | 16.8 |
| AD-27563-b1 | 100.2 | 3.4 | 109.5 | 2.3 |
| AD-27564-b1 | 46.1 | 8.2 | 90.0 | 3.4 |
| AD-27565-b1 | 79.7 | 0.4 | 103.8 | 9.3 |
| AD-27566-b1 | 78.4 | 21.8 | 97.7 | 8.0 |
| AD-27567-b1 | 27.4 | 0.9 | 89.7 | 0.3 |
| AD-27568-b1 | 41.8 | 1.8 | 111.0 | 10.2 |
| AD-27569-b1 | 105.7 | 9.3 | 103.3 | 5.2 |
| AD-27570-b1 | 28.0 | 0.8 | 71.6 | 1.7 |
| AD-27571-b1 | 34.7 | 2.3 | 83.2 | 5.4 |
| AD-27572-b1 | 19.0 | 0.2 | 54.7 | 2.4 |
| AD-27573-b1 | 105.0 | 3.9 | 119.4 | 0.2 |
| AD-27574-b1 | 113.9 | 9.8 | 109.9 | 0.9 |
| AD-27575-b1 | 40.5 | 2.5 | 76.2 | 8.9 |
| AD-27576-b1 | 60.1 | 2.2 | 93.1 | 6.5 |
| AD-27577-b1 | 93.8 | 15.6 | 105.6 | 9.4 |
| AD-27578-b1 | 83.2 | 27.1 | 101.6 | 11.8 |
| AD-27579-b1 | 96.9 | 0.8 | 99.2 | 11.5 |
| AD-27580-b1 | 92.6 | 16.7 | 97.1 | 11.2 |
| AD-27581-b1 | 99.5 | 3.9 | 120.0 | 1.0 |
| AD-27582-b1 | 110.0 | 8.3 | 97.7 | 4.4 |
| AD-27583-b1 | 16.4 | 2.2 | 75.4 | 0.2 |
| AD-27584-b1 | 14.1 | 4.8 | 51.0 | 4.1 |
| AD-27585-b1 | 56.0 | 5.3 | 100.0 | 0.0 |
| AD-27586-b1 | 11.0 | 0.5 | 63.7 | 16.0 |
| AD-27587-b1 | 78.4 | 6.2 | 94.6 | 16.8 |
| AD-27588-b1 | 90.0 | 16.9 | 90.0 | 1.0 |
| AD-27620-b1 | 34.0 | 2.3 | 99.3 | 28.3 |
| AD-27621-b1 | 71.3 | 26.5 | 111.7 | 23.3 |
| AD-27622-b1 | 66.8 | 28.5 | 102.7 | 25.1 |
| AD-27623-b1 | 96.9 | 2.7 | 98.9 | 22.5 |
| AD-27624-b1 | 85.3 | 15.9 | 106.2 | 25.0 |
| AD-27625-b1 | 91.0 | 19.1 | 121.5 | 30.8 |
| AD-27626-b1 | 99.7 | 3.6 | 116.8 | 29.1 |
| AD-27627-b1 | 89.8 | 14.8 | 81.2 | 21.6 |
| AD-27628-b1 | 19.4 | 6.5 | 56.5 | 11.8 |
| AD-27629-b1 | 29.7 | 13.8 | 90.0 | 11.6 |
| AD-27630-b1 | 69.8 | 38.6 | 87.9 | 16.0 |
| AD-27631-b1 | 92.0 | 64.9 | 91.0 | 12.2 |
| AD-27632-b1 | 29.8 | 1.7 | 81.6 | 12.9 |
| AD-27633-b1 | 58.1 | 11.1 | 112.1 | 25.3 |
| AD-27634-b1 | 71.9 | 26.1 | 108.3 | 24.4 |
| AD-27635-b1 | 83.9 | 11.3 | 103.4 | 27.7 |
| AD-27636-b1 | 84.0 | 20.5 | 115.0 | 13.7 |
| AD-27637-b1 | 49.2 | 11.0 | 102.9 | 22.0 |
| AD-27638-b1 | 90.2 | 3.7 | 116.6 | 27.4 |
| AD-27639-b1 | 18.6 | 8.6 | 68.6 | 10.0 |
| AD-27640-b1 | 79.5 | 7.6 | 114.8 | 18.4 |
| AD-27641-b1 | 68.2 | 28.6 | 113.5 | 14.1 |
| AD-27642-b1 | 77.5 | 31.1 | 108.6 | 12.7 |
| AD-27643-b1 | 10.0 | 2.1 | 46.2 | 6.7 |
| AD-27644-b1 | 75.2 | 35.8 | 102.4 | 29.1 |
| AD-27645-b1 | 12.0 | 4.2 | 49.4 | 11.0 |
| AD-27646-b1 | 60.9 | 25.1 | 109.2 | 12.5 |
| AD-27647-b1 | 67.8 | 10.0 | 101.9 | 18.8 |
| AD-27648-b1 | 92.5 | 11.7 | 120.1 | 17.2 |
| AD-27649-b1 | 84.0 | 11.2 | 116.8 | 29.9 |
| AD-27650-b1 | 71.7 | 9.9 | 98.9 | 16.3 |
| AD-27651-b1 | 66.2 | 5.6 | 108.0 | 11.8 |
| AD-27652-b1 | 78.5 | 18.5 | 108.4 | 26.2 |
| AD-27653-b1 | 64.3 | 16.9 | 97.5 | 12.6 |
| AD-27654-b1 | 75.7 | 33.2 | 102.6 | 21.2 |
| AD-27655-b1 | 93.6 | 38.0 | 92.8 | 11.6 |
| AD-27656-b1 | 64.2 | 10.9 | 102.4 | 29.1 |
| AD-27657-b1 | 31.0 | 0.2 | 59.4 | 20.5 |
| AD-27658-b1 | 84.3 | 39.5 | 108.5 | 24.7 |
| AD-27659-b1 | 71.2 | 8.6 | 99.2 | 17.6 |
| AD-27660-b1 | 42.8 | 28.5 | 75.8 | 11.2 |
| AD-27661-b1 | 32.7 | 15.7 | 55.1 | 15.0 |
| AD-27662-b1 | 15.5 | 5.0 | 27.3 | 5.8 |
| AD-27663-b1 | 19.9 | 8.5 | 24.9 | 2.0 |
| AD-27664-b1 | 18.1 | 4.3 | 44.5 | 5.8 |
| AD-27665-b1 | 70.1 | 10.4 | 109.2 | 12.5 |
| AD-27666-b1 | 13.2 | 9.7 | 30.7 | 4.3 |
| AD-27667-b1 | 19.0 | 0.0 | 67.2 | 1.1 |
| AD-27668-b1 | 15.0 | 6.2 | 84.9 | 18.7 |
| AD-27669-b1 | 19.3 | 0.5 | 74.8 | 13.8 |
| AD-27670-b1 | 15.1 | 0.8 | 54.3 | 12.4 |
| AD-27671-b1 | 19.3 | 13.5 | 40.5 | 8.4 |
| AD-27672-b1 | 94.1 | 2.3 | 100.7 | 13.6 |
| AD-27673-b1 | 46.9 | 14.7 | 51.6 | 2.2 |
| AD-27674-b1 | 101.8 | 29.2 | 115.2 | 18.5 |
| AD-27675-b1 | 88.2 | 27.0 | 110.1 | 18.2 |
| AD-27676-b1 | 86.8 | 13.5 | 102.6 | 18.9 |
| AD-27677-b1 | 62.0 | 11.2 | 111.3 | 12.4 |
| AD-27678-b1 | 33.0 | 3.4 | 86.9 | 10.8 |
| AD-27679-b1 | 16.8 | 0.3 | 30.0 | 4.7 |
| AD-27680-b1 | 33.8 | 0.3 | 94.6 | 13.6 |
| AD-27681-b1 | 89.8 | 8.8 | 99.1 | 13.2 |
| AD-27682-b1 | 34.9 | 0.7 | 90.0 | 16.3 |
| AD-27683-b1 | 69.5 | 1.2 | 96.5 | 20.4 |
| AD-27684-b1 | 78.1 | 0.1 | 105.1 | 25.9 |
| AD-27685-b1 | 113.0 | 43.9 | 86.8 | 9.1 |
| AD-27686-b1 | 77.1 | 2.0 | 95.9 | 12.5 |
| AD-27687-b1 | 92.0 | 21.7 | 103.7 | 11.5 |
| AD-27688-b1 | 109.2 | 39.7 | 113.6 | 25.9 |
| AD-27689-b1 | 66.4 | 26.4 | 100.3 | 17.1 |
| AD-27690-b1 | 43.1 | 3.3 | 83.4 | 7.0 |
| AD-27691-b1 | 43.7 | 1.2 | 77.0 | 1.3 |
| AD-27692-b1 | 23.7 | 14.5 | 61.7 | 9.6 |
| AD-27693-b1 | 31.4 | 15.7 | 46.3 | 11.5 |
| AD-27694-b1 | 66.9 | 29.4 | 97.5 | 10.0 |
| AD-27695-b1 | 72.7 | 10.0 | 87.1 | 4.6 |
| AD-27696-b1 | 54.1 | 1.8 | 101.0 | 14.5 |
| AD-27697-b1 | 85.1 | 0.8 | 97.9 | 17.8 |
| AD-27698-b1 | 37.6 | 14.2 | 90.7 | 20.0 |
| AD-27699-b1 | 26.8 | 3.9 | 80.4 | 12.3 |
| AD-27700-b1 | 17.0 | 0.2 | 71.3 | 16.7 |
| AD-27701-b1 | 15.3 | 2.0 | 43.4 | 8.7 |
| AD-27702-b1 | 23.3 | 4.0 | 66.4 | 12.1 |
| AD-27703-b1 | 10.3 | 0.0 | 36.5 | 4.0 |
| AD-27704-b1 | 97.7 | 4.6 | 119.2 | 15.9 |
| AD-27705-b1 | 47.9 | 12.5 | 97.9 | 7.8 |
| AD-27706-b1 | 16.4 | 3.1 | 39.2 | 0.8 |
| AD-27707-b1 | 10.1 | 4.7 | 28.5 | 1.6 |
| AD-27708-b1 | 22.2 | 12.1 | 25.8 | 1.1 |
| AD-27709-b1 | 17.1 | 6.6 | 19.2 | 1.4 |
| AD-27710-b1 | 14.6 | 0.3 | 47.2 | 2.2 |
| AD-27711-b1 | 11.1 | 5.3 | 32.4 | 8.5 |
| AD-27712-b1 | 13.1 | 1.0 | 17.0 | 17.3 |
| AD-27713-b1 | 47.1 | 8.3 | 88.3 | 0.9 |
| AD-27838-b1 | 25.8 | 4.7 | 74.5 | 8.9 |
| AD-27839-b1 | 69.2 | 23.7 | 95.1 | 10.6 |
| AD-27840-b1 | 61.8 | 20.3 | 105.0 | 2.2 |
| AD-27841-b1 | 88.2 | 22.9 | 102.6 | 7.9 |
| AD-27842-b1 | 58.6 | 24.4 | 94.3 | 1.1 |
| AD-27843-b1 | 54.6 | 19.4 | 101.4 | 9.4 |
| AD-27844-b1 | 20.8 | 11.6 | 77.0 | 0.3 |
| AD-27845-b1 | 46.7 | 15.9 | 87.8 | 9.4 |
| AD-27846-b1 | 73.8 | 32.4 | 100.7 | 4.3 |
| AD-27847-b1 | 66.5 | 22.6 | 106.5 | 5.4 |
| AD-27848-b1 | 48.4 | 20.3 | 77.1 | 12.5 |
| AD-27849-b1 | 69.2 | 29.8 | 111.4 | 26.7 |
| AD-27850-b1 | 80.8 | 26.9 | 99.1 | 7.9 |
| AD-27851-b1 | 50.6 | 20.6 | 99.6 | 7.7 |
| AD-27852-b1 | 51.5 | 10.4 | 90.1 | 0.7 |
| AD-27853-b1 | 74.6 | 7.5 | 86.4 | 15.9 |
| AD-27854-b1 | 42.9 | 7.3 | 87.2 | 1.2 |
| AD-27855-b1 | 37.2 | 13.5 | 72.2 | 3.7 |
| AD-27856-b1 | 57.1 | 11.7 | 102.9 | 6.2 |
| AD-27857-b1 | 75.8 | 15.2 | 90.2 | 12.1 |
| AD-27858-b1 | 44.4 | 16.1 | 86.8 | 1.8 |
| AD-27859-b1 | 61.6 | 16.2 | 97.8 | 11.4 |
| AD-27860-b1 | 12.4 | 4.0 | 36.2 | 3.6 |
| AD-27861-b1 | 23.6 | 6.6 | 53.5 | 1.3 |
| AD-27862-b1 | 28.6 | 12.2 | 77.0 | 6.2 |
| AD-27863-b1 | 34.9 | 14.4 | 73.0 | 9.8 |
| AD-27864-b1 | 28.6 | 9.5 | 77.1 | 5.2 |
| AD-27865-b1 | 45.3 | 15.4 | 73.7 | 8.0 |
| AD-27866-b1 | 52.1 | 20.3 | 77.3 | 13.9 |
| AD-27867-b1 | 51.1 | 8.2 | 91.8 | 6.9 |
| AD-27868-b1 | 22.9 | 1.4 | 65.4 | 14.1 |
| AD-27869-b1 | 14.9 | 0.6 | 35.9 | 7.1 |
| AD-27870-b1 | 15.0 | 0.7 | 34.5 | 3.4 |
| AD-27871-b1 | 14.5 | 0.9 | 31.1 | 4.5 |
| AD-27872-b1 | 12.8 | 0.8 | 29.7 | 4.5 |
| AD-27873-b1 | 27.1 | 7.2 | 64.6 | 6.4 |
| AD-27874-b1 | 17.0 | 4.3 | 40.5 | 8.1 |
| AD-27875-b1 | 20.5 | 6.6 | 47.2 | 1.9 |
| AD-27876-b1 | 33.6 | 5.0 | 84.5 | 5.5 |
| AD-27877-b1 | 30.0 | 5.1 | 65.5 | 7.2 |
| AD-27878-b1 | 22.3 | 1.3 | 45.0 | 3.2 |
| AD-27879-b1 | 23.6 | 0.3 | 67.1 | 3.9 |
| AD-27880-b1 | 78.6 | 17.8 | 96.8 | 12.2 |
| AD-27881-b1 | 23.1 | 0.5 | 38.5 | 8.2 |
| AD-27882-b1 | 29.1 | 5.2 | 66.8 | 12.1 |
| AD-27883-b1 | 23.5 | 0.2 | 53.7 | 1.9 |
| AD-27884-b1 | 32.6 | 9.3 | 76.4 | 4.4 |
| AD-27885-b1 | 27.5 | 6.2 | 58.5 | 2.4 |
| AD-27886-b1 | 48.4 | 23.1 | 78.7 | 2.2 |
| AD-27887-b1 | 41.6 | 17.3 | 80.8 | 2.8 |
| AD-27888-b1 | 11.6 | 4.1 | 45.4 | 21.3 |
| AD-27889-b1 | 38.8 | 8.6 | 88.0 | 2.5 |
| AD-27890-b1 | 9.4 | 2.7 | 34.6 | 5.5 |
| AD-27891-b1 | 10.6 | 1.2 | 55.9 | 0.6 |
| AD-27892-b1 | 13.4 | 1.2 | 50.0 | 4.6 |
| AD-27893-b1 | 14.1 | 2.3 | 72.9 | 21.0 |
| AD-27894-b1 | 11.3 | 3.0 | 42.8 | 1.3 |
| AD-27895-b1 | 20.0 | 1.2 | 41.7 | 1.3 |
| AD-27896-b1 | 20.6 | 10.4 | 54.9 | 8.7 |
| AD-27897-b1 | 29.8 | 4.8 | 84.8 | 13.0 |
| AD-27898-b1 | 24.0 | 10.6 | 61.1 | 0.5 |
| AD-27899-b1 | 28.4 | 7.5 | 69.0 | 7.5 |
| AD-27900-b1 | 69.3 | 28.3 | 98.3 | 9.5 |
| AD-27901-b1 | 51.9 | 9.0 | 82.4 | 11.0 |
| AD-27902-b1 | 79.7 | 11.4 | 95.9 | 2.5 |
| AD-27903-b1 | 93.0 | 27.7 | 99.6 | 9.9 |
| AD-27904-b1 | 80.4 | 23.6 | 99.5 | 3.8 |
| AD-27905-b1 | 66.0 | 10.4 | 83.9 | 1.3 |
| AD-27906-b1 | 47.0 | 7.0 | 68.1 | 5.9 |
| AD-27907-b1 | 69.7 | 13.6 | 85.7 | 6.4 |
| AD-27908-b1 | 56.5 | 17.5 | 82.3 | 10.8 |
| AD-27909-b1 | 69.6 | 16.1 | 94.4 | 19.2 |
| AD-27910-b1 | 11.6 | 3.2 | 30.6 | 4.7 |
| AD-27911-b1 | 17.6 | 7.1 | 46.7 | 5.5 |
| AD-27912-b1 | 9.7 | 1.2 | 27.1 | 2.8 |
| AD-27913-b1 | 18.1 | 4.3 | 27.9 | 2.5 |
| AD-27914-b1 | 10.8 | 0.7 | 36.7 | 2.5 |
| AD-27915-b1 | 13.2 | 1.8 | 20.2 | 0.7 |
| AD-27916-b1 | 19.6 | 2.1 | 41.7 | 2.2 |
| AD-27917-b1 | 16.1 | 0.7 | 21.4 | 1.8 |
| AD-27918-b1 | 13.6 | 0.7 | 14.5 | 1.6 |
| AD-27919-b1 | 9.2 | 0.1 | 25.5 | 1.7 |
| AD-27920-b1 | 16.6 | 4.5 | 26.8 | 0.0 |
| AD-27921-b1 | 34.9 | 14.1 | 59.9 | 3.7 |
| AD-27922-b1 | 61.5 | 20.7 | 81.1 | 6.2 |
| AD-27923-b1 | 38.9 | 15.6 | 85.0 | 1.0 |
| AD-27924-b1 | 57.4 | 12.9 | 90.7 | 5.3 |
| AD-27925-b1 | 14.8 | 0.7 | 30.2 | 6.2 |
| AD-27926-b1 | 27.4 | 3.8 | 61.6 | 6.0 |
| AD-27927-b1 | 16.5 | 1.4 | 29.3 | 2.9 |
| AD-27928-b1 | 86.1 | 18.9 | 100.4 | 4.6 |
| AD-27929-b1 | 65.4 | 25.3 | 90.4 | 6.1 |
| AD-27930-b1 | 26.3 | 3.5 | 53.2 | 4.9 |
| AD-28045-b1 | 55.3 | 4.2 | 90.2 | 1.4 |
| AD-28046-b1 | 44.4 | 6.6 | 75.8 | 6.2 |
| AD-28047-b1 | 38.2 | 2.6 | 89.1 | 1.9 |
| AD-28048-b1 | 14.4 | 0.5 | 39.5 | 1.9 |
| AD-28049-b1 | 33.5 | 1.0 | 78.2 | 1.5 |
| AD-28050-b1 | 40.5 | 0.8 | 84.9 | 2.3 |
| AD-28051-b1 | 12.9 | 0.9 | 14.9 | 2.4 |
| AD-28052-b1 | 18.4 | 0.0 | 28.3 | 1.7 |
| AD-28053-b1 | 23.2 | 9.5 | 54.1 | 8.9 |
| AD-28054-b1 | 43.1 | 10.3 | 72.0 | 21.8 |
| AD-28054-b2 | 25.4 | 7.1 | 71.6 | 7.0 |
| AD-28055-b1 | 47.0 | 11.0 | 80.7 | 0.0 |
| AD-28056-b1 | 10.8 | 2.8 | 23.1 | 0.0 |
| AD-28056-b2 | 9.9 | 0.4 | 25.3 | 3.0 |
| AD-28057-b1 | 70.9 | 0.9 | 85.1 | 6.3 |
| AD-28057-b2 | 79.1 | 25.9 | 89.1 | 8.8 |
| AD-28058-b1 | 17.0 | 0.9 | 46.3 | 3.3 |
| AD-28059-b1 | 7.4 | 3.6 | 12.1 | 3.1 |
| AD-28060-b1 | 10.6 | 2.3 | 15.3 | 0.6 |
| AD-28061-b1 | 15.1 | 9.8 | 63.3 | 3.8 |
| AD-28062-b1 | 23.7 | 3.8 | 73.5 | 3.2 |
| AD-28063-b1 | 28.3 | 0.0 | 83.7 | 0.6 |
| AD-28064-b1 | 90.1 | 4.6 | 104.7 | 2.6 |
| AD-28065-b1 | 12.2 | 0.2 | 46.8 | 8.1 |
| AD-28066-b1 | 81.7 | 11.6 | 90.2 | 9.0 |
| AD-28067-b1 | 71.8 | 3.9 | 86.1 | 9.3 |
| AD-28068-b1 | 17.3 | 2.2 | 56.3 | 3.0 |
| AD-28069-b1 | 40.8 | 4.0 | 85.6 | 2.1 |
| AD-28070-b1 | 72.4 | 0.5 | 102.7 | 1.8 |
| AD-28071-b1 | 36.9 | 6.6 | 76.7 | 1.3 |
| AD-28072-b1 | 49.8 | 11.7 | 125.2 | 45.6 |
| AD-28073-b1 | 105.1 | 41.4 | 108.7 | 4.3 |
| AD-28074-b1 | 37.9 | 12.9 | 79.3 | 2.0 |
| AD-28075-b1 | 26.9 | 0.8 | 84.3 | 12.4 |
| AD-28076-b1 | 58.8 | 4.0 | 85.2 | 2.3 |
| AD-28077-b1 | 30.1 | 7.0 | 90.5 | 11.1 |
| AD-28078-b1 | 68.4 | 26.5 | 98.7 | 1.9 |
| AD-28079-b1 | 27.7 | 1.7 | 72.2 | 8.5 |
| AD-28080-b1 | 84.5 | 7.7 | 104.5 | 10.3 |
| AD-28081-b1 | 89.7 | 6.6 | 109.3 | 1.4 |
| AD-28082-b1 | 106.3 | 28.3 | 96.9 | 5.0 |
| AD-28083-b1 | 109.6 | 1.1 | 107.2 | 0.0 |
| AD-28084-b1 | 114.0 | 1.4 | 108.5 | 2.3 |
| AD-28085-b1 | 103.1 | 8.1 | 92.7 | 10.4 |
| AD-28086-b1 | 65.9 | 3.9 | 104.5 | 5.9 |
| AD-28087-b1 | 82.4 | 32.6 | 105.4 | 5.2 |
| AD-28088-b1 | 87.7 | 6.2 | 102.4 | 7.3 |
| AD-28089-b1 | 93.3 | 19.3 | 95.5 | 0.2 |
| AD-28090-b1 | 77.1 | 15.9 | 96.3 | 8.8 |
| AD-28091-b1 | 101.1 | 13.6 | 93.8 | 3.0 |
| AD-28092-b1 | 75.1 | 1.1 | 98.5 | 3.2 |
| AD-28093-b1 | 91.5 | 3.1 | 95.4 | 7.5 |
| AD-28094-b1 | 37.0 | 1.9 | 94.0 | 10.6 |
| AD-28095-b1 | 79.0 | 3.3 | 105.6 | 5.5 |
| AD-28096-b1 | 76.1 | 5.0 | 89.0 | 6.9 |
| AD-28097-b1 | 44.8 | 3.2 | 94.6 | 20.0 |
| AD-28098-b1 | 45.2 | 9.4 | 97.0 | 24.3 |
| AD-28099-b1 | 22.9 | 1.7 | 63.3 | 4.8 |
| AD-28100-b1 | 28.3 | 5.3 | 76.7 | 2.1 |
| AD-28101-b1 | 76.9 | 5.8 | 99.0 | 3.8 |
| AD-28102-b1 | 75.7 | 47.3 | 98.5 | 3.1 |
| AD-28103-b1 | 81.1 | 37.5 | 99.7 | 2.0 |
| AD-28104-b1 | 19.5 | 8.1 | 63.8 | 3.1 |
| AD-28105-b1 | 21.8 | 10.5 | 79.4 | 4.3 |
| AD-28106-b1 | 112.7 | 28.7 | 106.7 | 5.4 |
| AD-28107-b1 | 81.0 | 7.9 | 104.0 | 5.1 |
| AD-28108-b1 | 80.9 | 20.0 | 99.7 | 1.5 |
| AD-28109-b1 | 84.3 | 12.4 | 99.9 | 12.0 |
| AD-28110-b1 | 17.1 | 6.5 | 52.0 | 4.1 |
| AD-28111-b1 | 7.0 | 0.2 | 7.8 | 1.4 |
| AD-28112-b1 | 30.5 | 32.0 | 13.0 | 3.8 |
| AD-28113-b1 | 10.4 | 0.0 | 16.9 | 0.5 |
| AD-28114-b1 | 8.9 | 1.6 | 19.2 | 2.0 |
| AD-28115-b1 | 8.6 | 4.3 | 24.3 | 4.3 |
| AD-28116-b1 | 7.0 | 3.7 | 22.1 | 3.0 |
| AD-28117-b1 | 11.8 | 0.1 | 18.8 | 1.2 |
| AD-28118-b1 | 6.5 | 1.0 | 13.8 | 1.3 |
| AD-28119-b1 | 14.0 | 4.5 | 10.2 | 1.4 |
| AD-28120-b1 | 10.6 | 0.3 | 10.4 | 0.9 |
| AD-28121-b1 | 8.5 | 0.9 | 11.4 | 0.7 |
| AD-28122-b1 | 9.1 | 2.8 | 11.2 | 0.4 |
| AD-9680-b10 | 11.7 | 2.3 | 15.4 | 0.0 |
| AD-9680-b9 | 9.4 | 1.8 | 13.4 | 0.8 |

TABLE 4
PCSK9 dose response

| Duplex Name | Average IC50 [nM] |
|---|---|
| AD-28111-b1 | 3.293 |
| AD-28119-b1 | 1.116 |
| AD-28120-b1 | 1.583 |
| AD-28122-b1 | 0.782 |
| AD-28121-b1 | 0.666 |
| AD-28059-b1 | 0.435 |
| AD-28112-b1 | 0.240 |
| AD-28118-b1 | 0.193 |
| AD-28051-b1 | 0.119 |
| AD-28060-b1 | 0.067 |
| AD-28113-b1 | 0.120 |
| AD-28117-b1 | 0.076 |
| AD-28114-b1 | 0.207 |
| AD-28116-b1 | 0.096 |
| AD-28056-b1 | 0.044 |
| AD-27917-b1 | 0.012 |
| AD-27920-b1 | 0.030 |
| AD-27913-b1 | 0.024 |
| AD-27927-b1 | 0.031 |
| AD-27872-b1 | 0.012 |
| AD-27910-b1 | 0.018 |
| AD-27070-b1 | 0.036 |
| AD-27090-b1 | 0.127 |
| AD-27091-b1 | 0.158 |
| AD-27110-b1 | 0.040 |
| AD-27368-b1 | 0.039 |
| AD-27515-b1 | 0.028 |
| AD-27519-b1 | 0.099 |
| AD-27538-b1 | 0.040 |
| AD-27556-b1 | 0.026 |
| AD-27662-b1 | 0.088 |
| AD-27663-b1 | 0.473 |
| AD-27666-b1 | 0.024 |
| AD-27671-b1 | 2.818 |
| AD-27679-b1 | 0.023 |
| AD-27703-b1 | 0.023 |
| AD-27707-b1 | 0.008 |
| AD-27708-b1 | 0.056 |
| AD-27709-b1 | 0.034 |
| AD-27712-b1 | 0.051 |
| AD-27912-b1 | 0.007 |
| AD-27915-b1 | 0.012 |
| AD-27918-b1 | 0.006 |
| AD-27919-b1 | 0.001 |
| AD-27925-b1 | 0.015 |
| AD-9680 | 0.006 |

TABLE 5
0.1 nM knockdown of PCSK9 lead optimization siRNAs

| | % Message | % Message | | |
|---|---|---|---|---|
| | remaining | remaining | | |
| | 0.1 nM | 0.1 nM | SD | SD |
| Duplex | experiment 1 | experiment 2 | experiment 1 | experiment 2 |
| AD-27219-b1 | 28.6 | 35.2 | 6.2 | 6.2 |
| AD-27220-b1 | 65.5 | 73.7 | 9.1 | 5.1 |
| AD-27221-b1 | 34.7 | 55.2 | 8.0 | 6.5 |
| AD-27222-b1 | 54.0 | 54.0 | 5.8 | 9.7 |
| AD-27223-b1 | 60.1 | 76.5 | 18.5 | 9.3 |
| AD-27224-b1 | 116.3 | 62.2 | 17.3 | 8.3 |
| AD-27225-b1 | 118.6 | 76.0 | 13.5 | 13.5 |
| AD-27226-b1 | 92.8 | 63.2 | 8.4 | 10.4 |
| AD-27227-b1 | 105.1 | 73.3 | 16.8 | 12.4 |
| AD-27228-b1 | 72.3 | 82.2 | 13.7 | 33.3 |
| AD-27229-b1 | 70.2 | 79.7 | 3.7 | 25.9 |
| AD-27230-b1 | 70.7 | 87.4 | 12.1 | 20.7 |
| AD-27231-b1 | 52.3 | 81.7 | 8.5 | 15.4 |
| AD-27232-b1 | 115.2 | 61.5 | 20.3 | 19.0 |
| AD-27233-b1 | 108.3 | 76.2 | 25.6 | 19.8 |
| AD-27234-b1 | 60.2 | 65.8 | 3.5 | 11.3 |
| AD-27235-b1 | 18.8 | 33.9 | 4.6 | 6.9 |
| AD-27236-b1 | 66.6 | 55.1 | 14.2 | 10.8 |
| AD-27237-b1 | 68.9 | 63.8 | 11.5 | 14.1 |
| AD-27238-b1 | 64.8 | 47.7 | 9.8 | 7.9 |
| AD-27239-b1 | 36.3 | 31.8 | 4.0 | 3.9 |
| AD-27240-b1 | 61.5 | 58.3 | 9.4 | 10.9 |
| AD-27241-b1 | 33.0 | 36.5 | 2.7 | 10.1 |
| AD-27242-b1 | 68.7 | 64.2 | 8.0 | 11.5 |
| AD-27243-b1 | 44.8 | 32.8 | 7.5 | 2.4 |
| AD-27244-b1 | 99.0 | 59.2 | 11.2 | 2.6 |
| AD-27245-b1 | 79.9 | 69.7 | 29.7 | 7.9 |
| AD-27246-b1 | 29.8 | 59.0 | 2.1 | 7.0 |
| AD-27247-b1 | 56.0 | 58.3 | 4.7 | 11.0 |
| AD-27248-b1 | 56.8 | 43.9 | 5.2 | 2.2 |
| AD-27249-b1 | 44.4 | 51.6 | 5.1 | 7.3 |
| AD-27250-b1 | 110.9 | 60.1 | 55.9 | 9.5 |
| AD-27251-b1 | 45.5 | 54.5 | 5.8 | 6.4 |
| AD-27252-b1 | 13.8 | 22.3 | 7.0 | 5.6 |
| AD-27254-b1 | 30.0 | 19.0 | 1.4 | 3.5 |
| AD-27256-b1 | 12.6 | 18.6 | 2.4 | 6.1 |
| AD-27258-b1 | 25.2 | 33.3 | 3.1 | 9.6 |
| AD-27260-b1 | 78.3 | 85.0 | 13.7 | 11.5 |
| AD-27262-b1 | 38.8 | 83.1 | 2.7 | 10.2 |
| AD-27265-b1 | 46.2 | 65.1 | 11.6 | 1.4 |
| AD-27267-b1 | 7.6 | 23.2 | 1.2 | 2.7 |
| AD-27269 | 26.3 | 47.1 | 4.0 | 18.8 |
| AD-27271 | 63.3 | 118.4 | 5.1 | 9.2 |
| AD-27273 | 79.9 | 22.1 | 18.5 | 3.9 |
| AD-27275 | 83.2 | 78.1 | 7.6 | 13.0 |
| AD-27277 | 74.4 | 84.4 | 3.6 | 6.4 |
| AD-27279 | 104.3 | 9.4 | 33.6 | 0.7 |

TABLE 6
AD-9680 and modified versions of AD-9680: dose response screen

| | SEQ ID | | SEQ ID | | Mean |
|---|---|---|---|---|---|
| duplexName | NO | Sense | NO | Antisense | IC50 |
| AD-9680 | 1221 | uucuAGAccuGuuuuGcuudTsdT | 1231 | AAGcAAAAcAGGUCuAGAAdTsdT | 5.36 |
| AD-27252 | 1222 | uucuAGAccuGuuuuGcuuuu | 1232 | AAGcAAAAcAGGUCuAGAAuu | 1.86 |
| AD-27253 | 1223 | uucuAGAccuGuuuuGcuuuu | 1233 | AAGCaAaAcAGGuCuAgAauu | 2.42 |
| AD-27254 | 1224 | UUCUaGaCcUgUuUuGcUuuu | 1234 | AAGcAAAAcAGGUCuAGAAuu | 18.75 |
| AD-27255 | 1225 | UUCUAGACCUGUUUUGCUUUU | 1235 | AAGCAAAACAGGUCUAGAAUU | 5.56 |
| AD-27256 | 1226 | UUCUAGACCUGUUUUGCUUUU | 1236 | AAGCaAaAcAgGuCuAgAauu | 1.29 |
| AD-27257 | 1227 | UUCUaGaCcUgUuUuGcUuuu | 1237 | AAGCAAAACAGGUCUAGAAUU | 5.10 |
| AD-27258 | 1228 | UUCUaGaCcUgUuUuGcUuuu | 1238 | AAGCaAaAcAgGuCuAgAauu | 3.48 |
| AD-27259 | 1229 | UUCUaGaCcUgUuUuGcUudTsdT | 1239 | AAGCaAaAcAgGuCuAgAadTsdT | 1.88 |
| AD-27267 | 1230 | uccuAGAccuGuuuuGcuudTsdT | 1240 | AAGcAAAAcAGGUCuAGGAdTsdT | 3.20 |

TABLE 7
AD-9680 with and without deletions: dose response screen

| | SEQ | | SEQ | | |
|---|---|---|---|---|---|
| | ID | | ID | | |
| dsRNA | NO | Sense | NO | Antisense | IC50, pM |
| AD-9680 | 1221 | uucuAGAccuGuuuuGcuuTsT | 1231 | AAGcAAAAcAGGUCuAGAATsT | 6.98 |
| AD-27268-b1 | 1221 | uucuAGAccuGuuuuGcuuTsT | 1241 | AAGcAAAAcAGGUCuAGAAdT | 15.04 |
| AD-27269-b1 | 1221 | uucuAGAccuGuuuuGcuuTsT | 1242 | AAGcAAAAcAGGUCuAGAA | 21.67 |
| AD-27270-b1 | 1221 | uucuAGAccuGuuuuGcuuTsT | 1243 | AAGcAAAAcAGGUCuAGA | 239.6 |
| AD-27271-b1 | 1221 | uucuAGAccuGuuuuGcuuTsT | 1244 | AAGcAAAAcAGGUCuAG | not achieved |
| AD-27272-b1 | 1221 | uucuAGAccuGuuuuGcuuTsT | 1245 | AAGcAAAAcAGGUCuA | not achieved |
| AD-27273-b1 | 1221 | uucuAGAccuGuuuuGcuuTsT | 1246 | AAGcAAAAcAGGUCu | not achieved |
| AD-27274-b1 | 1221 | uucuAGAccuGuuuuGcuuTsT | 1247 | AGcAAAAcAGGUCuAGAAdTsdT | 103.5 |
| AD-27275-b1 | 1221 | uucuAGAccuGuuuuGcuuTsT | 1248 | GcAAAAcAGGUCuAGAAdTsdT | not achieved |
| AD-27276-b1 | 1221 | uucuAGAccuGuuuuGcuuTsT | 1249 | cAAAAcAGGUCuAGAAdTsdT | not achieved |
| AD-27277-b1 | 1221 | uucuAGAccuGuuuuGcuuTsT | 1250 | AAAAcAGGUCuAGAAdTsdT | not achieved |
| AD-27278-b1 | 1221 | uucuAGAccuGuuuuGcuuTsT | 1251 | AAAcAGGUCuAGAAdTsdT | not achieved |
| AD-27279-b1 | 1221 | uucuAGAccuGuuuuGcuuTsT | 1252 | AAcAGGUCuAGAAdTsdT | not achieved |

TABLE 8
AD-9680 and AD-10792: sequences of sense strand, antisense strand, and target
sequence.

| Duplex | | Antisense strand | Target | Target |
|---|---|---|---|---|
| # | Sense strand 5′ to 3′ | 5′ to 3′ | location | sequence |
| AD-9680 | UucuAGAccuGuuuuGcuudTsdT | AAGcAAAAcAGGUCuAGAAdTsdT | 3530- | UUCUAGACCUGUUUUGCUU |
| | SEQ ID NO 1221 | SEQ ID NO: 1231 | 3548 | SEQ ID NO: 1253 |
| AD-10792 | GccuGGAGuuuAuucGGAAdTsdT | UUCCGAAuAAACUCcAGGCdTsdT | 1091- | GCCUGGAGUUUAUUCGGAA |
| | SEQ ID NO: 1254 | SEQ ID NO: 1255 | 1109 | SEQ ID NO: 1256 |

1.-27. (canceled)

28. A method for treating hypercholesterolemia in a subject heterozygous for an LDLR gene comprising administering to the subject an effective amount of a dsRNA for inhibiting expression of PCSK9, wherein said dsRNA comprises a sense strand and an antisense strand, the antisense strand comprising a region of complementarity to a PCSK9 RNA transcript and the dsRNA is 30 base pairs or less in length.

29. The method of claim 28, wherein the antisense strand is complementary to at least 15 contiguous nucleotides of the sense sequence of AD-9680.

30. The method of claim 28, wherein the dsRNA consists of AD-9680.

31. The method of claim 28, wherein the dsRNA is lipid formulated.

32. The method of claim 28, wherein the dsRNA is lipid formulated in a formulation selected from Table A.

33. The method of claim 28, wherein the subject is a primate or a rodent.

34. The method of claim 28, wherein the subject is a human.

35. The method of claim 28, wherein the effective amount is a concentration of 0.01-5.0 mg/kg bodyweight of the subject.

36. The method of claim 28, further comprising determining an LDLR genotype or phenotype of the subject.

37. The method of claim 28, wherein administering results in a decrease in serum cholesterol in the subject.

38. The method of claim 28, further comprising determining the serum cholesterol level in the subject.

39. The method of claim 28, wherein the region of complementarity consists of one of the antisense sequences of Table 1, 2, 6 or 7.

40. The method of claim 28, wherein the dsRNA comprises at least one modified nucleotide.

41. The method of claim 28, wherein the dsRNA comprises at least one 2′-O-methyl modified nucleotide and at least one nucleotide comprising a 5′-phosphorothioate group.

42. The method of claim 28, wherein the dsRNA comprises at least one modified nucleotide selected from the group consisting of: a 2′-O-methyl modified nucleotide, a 2′-deoxy-2′-fluoro modified nucleotide, a 2′-deoxy-modified nucleotide, a locked nucleotide, an abasic nucleotide, 2′-amino-modified nucleotide, 2′-alkyl-modified nucleotide, morpholino nucleotide, a phosphoramidate, a nucleotide comprising a 5′-phosphorothioate group, and a non-natural base comprising nucleotide.

43. The method of claim 28, wherein each strand is 19-24 nucleotides in length.

44. The method of claim 28, wherein each strand comprises a 3′ overhang of 2 nucleotides.

45. The method of claim 28, wherein the dsRNA further comprises a ligand.

46. The method of claim 28, wherein the dsRNA further comprises a ligand conjugated to the 3′ end of the sense strand of the dsRNA.

47. A double-stranded ribonucleic acid (dsRNA) for inhibiting expression of PCSK9, wherein the dsRNA consists of a dsRNA described in Table 1, 2, 6 or 7, excluding AD-9680.

The application's sequence listing, which the Patent Office published only in electronic form, follows.

SEQUENCE LISTING (2480 sequences)

SEQ ID NO: 1 - RNA, 19 nt, Artificial Sequence
  Description of Artificial Sequence: Synthetic oligonucleotide
acuacaucgaggaggacuc

SEQ ID NO: 2 - RNA, 19 nt, Artificial Sequence
  Description of Artificial Sequence: Synthetic oligonucleotide
uacaucgaggaggacuccu

SEQ ID NO: 3 - RNA, 19 nt, Artificial Sequence
  Description of Artificial Sequence: Synthetic oligonucleotide
acaucgaggaggacuccuc

SEQ ID NO: 4 - RNA, 19 nt, Artificial Sequence
  Description of Artificial Sequence: Synthetic oligonucleotide
caucgaggaggacuccucu

SEQ ID NO: 5 - RNA, 19 nt, Artificial Sequence
  Description of Artificial Sequence: Synthetic oligonucleotide
ucgaggaggacuccucugu

SEQ ID NO: 6 - RNA, 19 nt, Artificial Sequence
  Description of Artificial Sequence: Synthetic oligonucleotide
cgaggaggacuccucuguc

SEQ ID NO: 7 - RNA, 19 nt, Artificial Sequence
  Description of Artificial Sequence: Synthetic oligonucleotide
gaggaggacuccucugucu

SEQ ID NO: 8 - RNA, 19 nt, Artificial Sequence
  Description of Artificial Sequence: Synthetic oligonucleotide
aggaggacuccucugucuu

SEQ ID NO: 9 - RNA, 19 nt, Artificial Sequence
  Description of Artificial Sequence: Synthetic oligonucleotide
gcagccugguggaggugua

SEQ ID NO: 10 - RNA, 19 nt, Artificial Sequence
  Description of Artificial Sequence: Synthetic oligonucleotide
cagccugguggagguguau

SEQ ID NO: 11 - RNA, 19 nt, Artificial Sequence
  Description of Artificial Sequence: Synthetic oligonucleotide
agccugguggagguguauc

SEQ ID NO: 12 - RNA, 19 nt, Artificial Sequence
  Description of Artificial Sequence: Synthetic oligonucleotide
gccugguggagguguaucu

SEQ ID NO: 13 - RNA, 19 nt, Artificial Sequence
  Description of Artificial Sequence: Synthetic oligonucleotide
guggagguguaucuccuag

SEQ ID NO: 14 - RNA, 19 nt, Artificial Sequence
  Description of Artificial Sequence: Synthetic oligonucleotide
uggagguguaucuccuaga

SEQ ID NO: 15 - RNA, 19 nt, Artificial Sequence
  Description of Artificial Sequence: Synthetic oligonucleotide
gagguguaucuccuagaca

SEQ ID NO: 16 - RNA, 19 nt, Artificial Sequence
  Description of Artificial Sequence: Synthetic oligonucleotide
guguaucuccuagacacca

SEQ ID NO: 17 - RNA, 19 nt, Artificial Sequence
  Description of Artificial Sequence: Synthetic oligonucleotide
uaucuccuagacaccagca

SEQ ID NO: 18 - RNA, 19 nt, Artificial Sequence
  Description of Artificial Sequence: Synthetic oligonucleotide
aucuccuagacaccagcau

SEQ ID NO: 19 - RNA, 19 nt, Artificial Sequence
  Description of Artificial Sequence: Synthetic oligonucleotide
cuagacaccagcauacaga

SEQ ID NO: 20 - RNA, 19 nt, Artificial Sequence
  Description of Artificial Sequence: Synthetic oligonucleotide
uagacaccagcauacagag

SEQ ID NO: 21 - RNA, 19 nt, Artificial Sequence
  Description of Artificial Sequence: Synthetic oligonucleotide
agacaccagcauacagagu

SEQ ID NO: 22 - RNA, 19 nt, Artificial Sequence
  Description of Artificial Sequence: Synthetic oligonucleotide
acaccagcauacagaguga

SEQ ID NO: 23 - RNA, 19 nt, Artificial Sequence
  Description of Artificial Sequence: Synthetic oligonucleotide
caccagcauacagagugac

SEQ ID NO: 24 - RNA, 19 nt, Artificial Sequence
  Description of Artificial Sequence: Synthetic oligonucleotide
ccagcauacagagugacca

SEQ ID NO: 25 - RNA, 19 nt, Artificial Sequence
  Description of Artificial Sequence: Synthetic oligonucleotide
cagcauacagagugaccac

SEQ ID NO: 26 - RNA, 19 nt, Artificial Sequence
  Description of Artificial Sequence: Synthetic oligonucleotide
uacagagugaccaccggga

SEQ ID NO: 27 - RNA, 19 nt, Artificial Sequence
  Description of Artificial Sequence: Synthetic oligonucleotide
acagagugaccaccgggaa

SEQ ID NO: 28 - RNA, 19 nt, Artificial Sequence
  Description of Artificial Sequence: Synthetic oligonucleotide
cagagugaccaccgggaaa

SEQ ID NO: 29 - RNA, 19 nt, Artificial Sequence
  Description of Artificial Sequence: Synthetic oligonucleotide
ugaccaccgggaaaucgag

SEQ ID NO: 30 - RNA, 19 nt, Artificial Sequence
  Description of Artificial Sequence: Synthetic oligonucleotide
caccgggaaaucgagggca

SEQ ID NO: 31 - RNA, 19 nt, Artificial Sequence
  Description of Artificial Sequence: Synthetic oligonucleotide
accgggaaaucgagggcag

SEQ ID NO: 32 - RNA, 19 nt, Artificial Sequence
  Description of Artificial Sequence: Synthetic oligonucleotide
gggaaaucgagggcagggu

SEQ ID NO: 33 - RNA, 19 nt, Artificial Sequence
  Description of Artificial Sequence: Synthetic oligonucleotide
ggaaaucgagggcaggguc

SEQ ID NO: 34 - RNA, 19 nt, Artificial Sequence
  Description of Artificial Sequence: Synthetic oligonucleotide
gaaaucgagggcaggguca

SEQ ID NO: 35 - RNA, 19 nt, Artificial Sequence
  Description of Artificial Sequence: Synthetic oligonucleotide
aaucgagggcagggucaug

SEQ ID NO: 36 - RNA, 19 nt, Artificial Sequence
  Description of Artificial Sequence: Synthetic oligonucleotide
ucgagggcagggucauggu

SEQ ID NO: 37 - RNA, 19 nt, Artificial Sequence
  Description of Artificial Sequence: Synthetic oligonucleotide
agggcagggucauggucac

SEQ ID NO: 38 - RNA, 19 nt, Artificial Sequence
  Description of Artificial Sequence: Synthetic oligonucleotide
gcagggucauggucaccga

SEQ ID NO: 39 - RNA, 19 nt, Artificial Sequence
  Description of Artificial Sequence: Synthetic oligonucleotide
gggucauggucaccgacuu

SEQ ID NO: 40 - RNA, 19 nt, Artificial Sequence
  Description of Artificial Sequence: Synthetic oligonucleotide
ggucauggucaccgacuuc

SEQ ID NO: 41 - RNA, 19 nt, Artificial Sequence
  Description of Artificial Sequence: Synthetic oligonucleotide
ucauggucaccgacuucga

SEQ ID NO: 42 - RNA, 19 nt, Artificial Sequence
  Description of Artificial Sequence: Synthetic oligonucleotide
cauggucaccgacuucgag

SEQ ID NO: 43 - RNA, 19 nt, Artificial Sequence
  Description of Artificial Sequence: Synthetic oligonucleotide
ggacccgcuuccacagaca

SEQ ID NO: 44 - RNA, 19 nt, Artificial Sequence
  Description of Artificial Sequence: Synthetic oligonucleotide
gacccgcuuccacagacag

SEQ ID NO: 45 - RNA, 19 nt, Artificial Sequence
  Description of Artificial Sequence: Synthetic oligonucleotide
cgcuuccacagacaggcca

SEQ ID NO: 46 - RNA, 19 nt, Artificial Sequence
  Description of Artificial Sequence: Synthetic oligonucleotide
gcuuccacagacaggccag

SEQ ID NO: 47 - RNA, 19 nt, Artificial Sequence
  Description of Artificial Sequence: Synthetic oligonucleotide
uuccacagacaggccagca

SEQ ID NO: 48 - RNA, 19 nt, Artificial Sequence
  Description of Artificial Sequence: Synthetic oligonucleotide
uccacagacaggccagcaa

SEQ ID NO: 49 - RNA, 19 nt, Artificial Sequence
  Description of Artificial Sequence: Synthetic oligonucleotide
ccacagacaggccagcaag

SEQ ID NO: 50 - RNA, 19 nt, Artificial Sequence
  Description of Artificial Sequence: Synthetic oligonucleotide
cacagacaggccagcaagu

SEQ ID NO: 51 - RNA, 19 nt, Artificial Sequence
  Description of Artificial Sequence: Synthetic oligonucleotide
acagacaggccagcaagug

SEQ ID NO: 52 - RNA, 19 nt, Artificial Sequence
  Description of Artificial Sequence: Synthetic oligonucleotide
cagacaggccagcaagugu

SEQ ID NO: 53 - RNA, 19 nt, Artificial Sequence
  Description of Artificial Sequence: Synthetic oligonucleotide
agacaggccagcaagugug

SEQ ID NO: 54 - RNA, 19 nt, Artificial Sequence
  Description of Artificial Sequence: Synthetic oligonucleotide
gacaggccagcaaguguga

SEQ ID NO: 55 - RNA, 19 nt, Artificial Sequence
  Description of Artificial Sequence: Synthetic oligonucleotide
acaggccagcaagugugac

SEQ ID NO: 56 - RNA, 19 nt, Artificial Sequence
  Description of Artificial Sequence: Synthetic oligonucleotide
caggccagcaagugugaca

SEQ ID NO: 57 - RNA, 19 nt, Artificial Sequence
  Description of Artificial Sequence: Synthetic oligonucleotide
aggccagcaagugugacag

SEQ ID NO: 58 - RNA, 19 nt, Artificial Sequence
  Description of Artificial Sequence: Synthetic oligonucleotide
agccugcgcgugcucaacu

SEQ ID NO: 59 - RNA, 19 nt, Artificial Sequence
  Description of Artificial Sequence: Synthetic oligonucleotide
gcgcgugcucaacugccaa

SEQ ID NO: 60 - RNA, 19 nt, Artificial Sequence
  Description of Artificial Sequence: Synthetic oligonucleotide
gugcucaacugccaaggga

SEQ ID NO: 61 - RNA, 19 nt, Artificial Sequence
  Description of Artificial Sequence: Synthetic oligonucleotide
ugcucaacugccaagggaa

SEQ ID NO: 62 - RNA, 19 nt, Artificial Sequence
  Description of Artificial Sequence: Synthetic oligonucleotide
gcucaacugccaagggaag

SEQ ID NO: 63 - RNA, 19 nt, Artificial Sequence
  Description of Artificial Sequence: Synthetic oligonucleotide
aacugccaagggaagggca

SEQ ID NO: 64 - RNA, 19 nt, Artificial Sequence
  Description of Artificial Sequence: Synthetic oligonucleotide
acugccaagggaagggcac

SEQ ID NO: 65 - RNA, 19 nt, Artificial Sequence
  Description of Artificial Sequence: Synthetic oligonucleotide
cacccucauaggccuggag

SEQ ID NO: 66 - RNA, 19 nt, Artificial Sequence
  Description of Artificial Sequence: Synthetic oligonucleotide
acccucauaggccuggagu

SEQ ID NO: 67 - RNA, 19 nt, Artificial Sequence
  Description of Artificial Sequence: Synthetic oligonucleotide
cccucauaggccuggaguu

SEQ ID NO: 68 - RNA, 19 nt, Artificial Sequence
  Description of Artificial Sequence: Synthetic oligonucleotide
ccucauaggccuggaguuu

SEQ ID NO: 69 - RNA, 19 nt, Artificial Sequence
  Description of Artificial Sequence: Synthetic oligonucleotide
cucauaggccuggaguuua

SEQ ID NO: 70 - RNA, 19 nt, Artificial Sequence
  Description of Artificial Sequence: Synthetic oligonucleotide
ccuggaguuuauucggaaa

SEQ ID NO: 71 - RNA, 19 nt, Artificial Sequence
  Description of Artificial Sequence: Synthetic oligonucleotide
uggaguuuauucggaaaag

SEQ ID NO: 72 - RNA, 19 nt, Artificial Sequence
  Description of Artificial Sequence: Synthetic oligonucleotide
aguuuauucggaaaagcca

SEQ ID NO: 73 - RNA, 19 nt, Artificial Sequence
  Description of Artificial Sequence: Synthetic oligonucleotide
guuuauucggaaaagccag

SEQ ID NO: 74 - RNA, 19 nt, Artificial Sequence
  Description of Artificial Sequence: Synthetic oligonucleotide
uauucggaaaagccagcug

SEQ ID NO: 75 - RNA, 19 nt, Artificial Sequence
  Description of Artificial Sequence: Synthetic oligonucleotide
uucggaaaagccagcuggu

SEQ ID NO: 76 - RNA, 19 nt, Artificial Sequence
  Description of Artificial Sequence: Synthetic oligonucleotide
ucggaaaagccagcugguc

SEQ ID NO: 77 - RNA, 19 nt, Artificial Sequence
  Description of Artificial Sequence: Synthetic oligonucleotide
ggaaaagccagcuggucca

SEQ ID NO: 78 - RNA, 19 nt, Artificial Sequence
  Description of Artificial Sequence: Synthetic oligonucleotide
gaaaagccagcugguccag

SEQ ID NO: 79 - RNA, 19 nt, Artificial Sequence
  Description of Artificial Sequence: Synthetic oligonucleotide
ucaccgcugccggcaacuu

SEQ ID NO: 80 - RNA, 19 nt, Artificial Sequence
  Description of Artificial Sequence: Synthetic oligonucleotide
aacuuccgggacgaugccu

SEQ ID NO: 81 - RNA, 19 nt, Artificial Sequence
  Description of Artificial Sequence: Synthetic oligonucleotide
acuuccgggacgaugccug

SEQ ID NO: 82 - RNA, 19 nt, Artificial Sequence
  Description of Artificial Sequence: Synthetic oligonucleotide
gggacgaugccugccucua

SEQ ID NO: 83 - RNA, 19 nt, Artificial Sequence
  Description of Artificial Sequence: Synthetic oligonucleotide
gacgaugccugccucuacu

SEQ ID NO: 84 - RNA, 19 nt, Artificial Sequence
  Description of Artificial Sequence: Synthetic oligonucleotide
acgaugccugccucuacuc

SEQ ID NO: 85 - RNA, 19 nt, Artificial Sequence
  Description of Artificial Sequence: Synthetic oligonucleotide
cccgaggucaucacaguug

SEQ ID NO: 86 - RNA, 19 nt, Artificial Sequence
  Description of Artificial Sequence: Synthetic oligonucleotide
gucaucacaguuggggcca

SEQ ID NO: 87 - RNA, 19 nt, Artificial Sequence
  Description of Artificial Sequence: Synthetic oligonucleotide
ucaucacaguuggggccac

SEQ ID NO: 88 - RNA, 19 nt, Artificial Sequence
  Description of Artificial Sequence: Synthetic oligonucleotide
aucacaguuggggccacca

SEQ ID NO: 89 - RNA, 19 nt, Artificial Sequence
  Description of Artificial Sequence: Synthetic oligonucleotide
ucacaguuggggccaccaa

SEQ ID NO: 90 - RNA, 19 nt, Artificial Sequence
  Description of Artificial Sequence: Synthetic oligonucleotide
cacaguuggggccaccaau

SEQ ID NO: 91 - RNA, 19 nt, Artificial Sequence
  Description of Artificial Sequence: Synthetic oligonucleotide
acaguuggggccaccaaug

SEQ ID NO: 92 - RNA, 19 nt, Artificial Sequence
  Description of Artificial Sequence: Synthetic oligonucleotide
uuggggccaccaaugccca

SEQ ID NO: 93 - RNA, 19 nt, Artificial Sequence
  Description of Artificial Sequence: Synthetic oligonucleotide
cggugacccuggggacuuu

SEQ ID NO: 94 - RNA, 19 nt, Artificial Sequence
  Description of Artificial Sequence: Synthetic oligonucleotide
ggugacccuggggacuuug

SEQ ID NO: 95 - RNA, 19 nt, Artificial Sequence
  Description of Artificial Sequence: Synthetic oligonucleotide
gggacuuuggggaccaacu

SEQ ID NO: 96 - RNA, 19 nt, Artificial Sequence
  Description of Artificial Sequence: Synthetic oligonucleotide
ggacuuuggggaccaacuu

SEQ ID NO: 97 - RNA, 19 nt, Artificial Sequence
  Description of Artificial Sequence: Synthetic oligonucleotide
ugaaggaggagacccaccu

SEQ ID NO: 98 - RNA, 19 nt, Artificial Sequence
  Description of Artificial Sequence: Synthetic oligonucleotide
gccuucuuccuggcuuccu

SEQ ID NO: 99 - RNA, 19 nt, Artificial Sequence
  Description of Artificial Sequence: Synthetic oligonucleotide
ggaggacuccucugucuuu

SEQ ID NO: 100 - RNA, 19 nt, Artificial Sequence
  Description of Artificial Sequence: Synthetic oligonucleotide
uggucaccgacuucgagaa

SEQ ID NO: 101 - RNA, 19 nt, Artificial Sequence
  Description of Artificial Sequence: Synthetic oligonucleotide
ggccagcaagugugacagu

SEQ ID NO: 102 - RNA, 19 nt, Artificial Sequence
  Description of Artificial Sequence: Synthetic oligonucleotide
ucauggcacccaccuggca

SEQ ID NO: 103 - RNA, 19 nt, Artificial Sequence
  Description of Artificial Sequence: Synthetic oligonucleotide
aagccagcugguccagccu

SEQ ID NO: 104 - RNA, 19 nt, Artificial Sequence
  Description of Artificial Sequence: Synthetic oligonucleotide
agcucccgaggucaucaca

SEQ ID NO: 105 - RNA, 19 nt, Artificial Sequence
  Description of Artificial Sequence: Synthetic oligonucleotide
uggggccaccaaugcccaa

SEQ ID NO: 106 - RNA, 19 nt, Artificial Sequence
  Description of Artificial Sequence: Synthetic oligonucleotide
aagaccagccggugacccu

SEQ ID NO: 107 - RNA, 19 nt, Artificial Sequence
  Description of Artificial Sequence: Synthetic oligonucleotide
gcaccugcuuugugucaca

SEQ ID NO: 108 - RNA, 19 nt, Artificial Sequence
  Description of Artificial Sequence: Synthetic oligonucleotide
gcuguuuugcaggacugua

SEQ ID NO: 109 - RNA, 19 nt, Artificial Sequence
  Description of Artificial Sequence: Synthetic oligonucleotide
gccuacacggauggccaca

SEQ ID NO: 110 - RNA, 19 nt, Artificial Sequence
  Description of Artificial Sequence: Synthetic oligonucleotide
gccaacugcagcguccaca

SEQ ID NO: 111 - RNA, 19 nt, Artificial Sequence
  Description of Artificial Sequence: Synthetic oligonucleotide
acacagcuccaccagcuga

SEQ ID NO: 112 - RNA, 19 nt, Artificial Sequence
  Description of Artificial Sequence: Synthetic oligonucleotide
acagggccacguccucaca

SEQ ID NO: 113 - RNA, 19 nt, Artificial Sequence
  Description of Artificial Sequence: Synthetic oligonucleotide
uagucaggagccgggacgu

SEQ ID NO: 114 - RNA, 19 nt, Artificial Sequence
  Description of Artificial Sequence: Synthetic oligonucleotide
uacaggcagcaccagcgaa

SEQ ID NO: 115 - RNA, 19 nt, Artificial Sequence
  Description of Artificial Sequence: Synthetic oligonucleotide
acagccguugccaucugcu

SEQ ID NO: 116 - RNA, 19 nt, Artificial Sequence
  Description of Artificial Sequence: Synthetic oligonucleotide
aagggcuggggcugagcuu

SEQ ID NO: 117 - RNA, 19 nt, Artificial Sequence
  Description of Artificial Sequence: Synthetic oligonucleotide
agggcuggggcugagcuuu

SEQ ID NO: 118 - RNA, 19 nt, Artificial Sequence
  Description of Artificial Sequence: Synthetic oligonucleotide
ucucagcccuccauggccu

SEQ ID NO: 119 - RNA, 19 nt, Artificial Sequence
  Description of Artificial Sequence: Synthetic oligonucleotide
gcugccagcugcucccaau

SEQ ID NO: 120 - RNA, 19 nt, Artificial Sequence
  Description of Artificial Sequence: Synthetic oligonucleotide
ggucuccaccaaggaggca

SEQ ID NO: 121 - RNA, 19 nt, Artificial Sequence
  Description of Artificial Sequence: Synthetic oligonucleotide
gcaggauucuucccaugga

SEQ ID NO: 122 - RNA, 19 nt, Artificial Sequence
  Description of Artificial Sequence: Synthetic oligonucleotide
gugcugauggcccucaucu

SEQ ID NO: 123 - RNA, 19 nt, Artificial Sequence
  Description of Artificial Sequence: Synthetic oligonucleotide
uggcccucaucuccagcua

SEQ ID NO: 124 - RNA, 19 nt, Artificial Sequence
  Description of Artificial Sequence: Synthetic oligonucleotide
uuagcuuucuggauggcau

SEQ ID NO: 125 - RNA, 19 nt, Artificial Sequence
  Description of Artificial Sequence: Synthetic oligonucleotide
cugcucuaugccaggcugu

SEQ ID NO: 126 - RNA, 19 nt, Artificial Sequence
  Description of Artificial Sequence: Synthetic oligonucleotide
gcucugaagccaagccucu

SEQ ID NO: 127 - RNA, 19 nt, Artificial Sequence
  Description of Artificial Sequence: Synthetic oligonucleotide
gaacgaugccugcaggcau

SEQ ID NO: 128 - RNA, 19 nt, Artificial Sequence
  Description of Artificial Sequence: Synthetic oligonucleotide
aacaacugucccuccuuga

SEQ ID NO: 129 - RNA, 19 nt, Artificial Sequence
  Description of Artificial Sequence: Synthetic oligonucleotide
guugccuuuuuacagccaa

SEQ ID NO: 130 - RNA, 21 nt, Artificial Sequence
  Description of Artificial Sequence: Synthetic oligonucleotide
uucuagaccuguuuugcuuuu

SEQ ID NO: 131 - RNA, 21 nt, Artificial Sequence
  Description of Artificial Sequence: Synthetic oligonucleotide
uucuagaccuguuuugcuuuu

SEQ ID NO: 132 - RNA, 21 nt, Artificial Sequence
  Description of Artificial Sequence: Synthetic oligonucleotide
uucuagaccuguuuugcuuuu

SEQ ID NO: 133 - RNA, 21 nt, Artificial Sequence
  Description of Artificial Sequence: Synthetic oligonucleotide
uucuagaccuguuuugcuuuu

SEQ ID NO: 134 - RNA, 21 nt, Artificial Sequence
  Description of Artificial Sequence: Synthetic oligonucleotide
uucuagaccuguuuugcuuuu

SEQ ID NO: 135 - RNA, 21 nt, Artificial Sequence
  Description of Artificial Sequence: Synthetic oligonucleotide
uucuagaccuguuuugcuuuu

SEQ ID NO: 136 - RNA, 21 nt, Artificial Sequence
  Description of Artificial Sequence: Synthetic oligonucleotide
uucuagaccuguuuugcuuuu

SEQ ID NO: 137 - RNA, 19 nt, Artificial Sequence
  Description of Artificial Sequence: Synthetic oligonucleotide
uucuagaccuguuuugcuu

SEQ ID NO: 138 - RNA, 19 nt, Artificial Sequence
  Description of Artificial Sequence: Synthetic oligonucleotide
ucagcuccugcacaguccu

SEQ ID NO: 139 - RNA, 19 nt, Artificial Sequence
  Description of Artificial Sequence: Synthetic oligonucleotide
ccaagggaagggcacgguu

SEQ ID NO: 140 - RNA, 19 nt, Artificial Sequence
  Description of Artificial Sequence: Synthetic oligonucleotide
cuggcaccuacgugguggu

SEQ ID NO: 141 - RNA, 19 nt, Artificial Sequence
  Description of Artificial Sequence: Synthetic oligonucleotide
uccuagaccuguuuugcuu

SEQ ID NO: 142 - RNA, 19 nt, Artificial Sequence
  Description of Artificial Sequence: Synthetic oligonucleotide
uucuagaccuguuuugcuu

SEQ ID NO: 143 - RNA, 19 nt, Artificial Sequence
  Description of Artificial Sequence: Synthetic oligonucleotide
uucuagaccuguuuugcuu

SEQ ID NO: 144 - RNA, 19 nt, Artificial Sequence
  Description of Artificial Sequence: Synthetic oligonucleotide
uucuagaccuguuuugcuu

SEQ ID NO: 145 - RNA, 19 nt, Artificial Sequence
  Description of Artificial Sequence: Synthetic oligonucleotide
uucuagaccuguuuugcuu

SEQ ID NO: 146 - RNA, 19 nt, Artificial Sequence
  Description of Artificial Sequence: Synthetic oligonucleotide
uucuagaccuguuuugcuu

SEQ ID NO: 147 - RNA, 19 nt, Artificial Sequence
  Description of Artificial Sequence: Synthetic oligonucleotide
uucuagaccuguuuugcuu

SEQ ID NO: 148 - RNA, 19 nt, Artificial Sequence
  Description of Artificial Sequence: Synthetic oligonucleotide
uucuagaccuguuuugcuu

SEQ ID NO: 149 - RNA, 19 nt, Artificial Sequence
  Description of Artificial Sequence: Synthetic oligonucleotide
uucuagaccuguuuugcuu

SEQ ID NO: 150 - RNA, 19 nt, Artificial Sequence
  Description of Artificial Sequence: Synthetic oligonucleotide
uucuagaccuguuuugcuu

SEQ ID NO: 151 - RNA, 19 nt, Artificial Sequence
  Description of Artificial Sequence: Synthetic oligonucleotide
uucuagaccuguuuugcuu

SEQ ID NO: 152 - RNA, 19 nt, Artificial Sequence
  Description of Artificial Sequence: Synthetic oligonucleotide
uucuagaccuguuuugcuu

SEQ ID NO: 153 - RNA, 19 nt, Artificial Sequence
  Description of Artificial Sequence: Synthetic oligonucleotide
uucuagaccuguuuugcuu

SEQ ID NO: 154 - RNA, 19 nt, Artificial Sequence
  Description of Artificial Sequence: Synthetic oligonucleotide
gacuuuggggaccaacuuu

SEQ ID NO: 155 - RNA, 19 nt, Artificial Sequence
  Description of Artificial Sequence: Synthetic oligonucleotide
acuuuggggaccaacuuug

SEQ ID NO: 156 - RNA, 19 nt, Artificial Sequence
  Description of Artificial Sequence: Synthetic oligonucleotide
gggaccaacuuuggccgcu

SEQ ID NO: 157 - RNA, 19 nt, Artificial Sequence
  Description of Artificial Sequence: Synthetic oligonucleotide
ggaccaacuuuggccgcug

SEQ ID NO: 158 - RNA, 19 nt, Artificial Sequence
  Description of Artificial Sequence: Synthetic oligonucleotide
gaccaacuuuggccgcugu

SEQ ID NO: 159 - RNA, 19 nt, Artificial Sequence
  Description of Artificial Sequence: Synthetic oligonucleotide
ccaacuuuggccgcugugu

SEQ ID NO: 160 - RNA, 19 nt, Artificial Sequence
  Description of Artificial Sequence: Synthetic oligonucleotide
acuuuggccgcugugugga

SEQ ID NO: 161 - RNA, 19 nt, Artificial Sequence
  Description of Artificial Sequence: Synthetic oligonucleotide
cuuuggccgcuguguggac

SEQ ID NO: 162 - RNA, 19 nt, Artificial Sequence
  Description of Artificial Sequence: Synthetic oligonucleotide
uuggccgcuguguggaccu

SEQ ID NO: 163 - RNA, 19 nt, Artificial Sequence
  Description of Artificial Sequence: Synthetic oligonucleotide
gccgcuguguggaccucuu

SEQ ID NO: 164 - RNA, 19 nt, Artificial Sequence
  Description of Artificial Sequence: Synthetic oligonucleotide
ccgcuguguggaccucuuu

SEQ ID NO: 165 - RNA, 19 nt, Artificial Sequence
  Description of Artificial Sequence: Synthetic oligonucleotide
uguggaccucuuugcccca

SEQ ID NO: 166 - RNA, 19 nt, Artificial Sequence
  Description of Artificial Sequence: Synthetic oligonucleotide
guggaccucuuugccccag

SEQ ID NO: 167 - RNA, 19 nt, Artificial Sequence
  Description of Artificial Sequence: Synthetic oligonucleotide
cccaggggaggacaucauu

SEQ ID NO: 168 - RNA, 19 nt, Artificial Sequence
  Description of Artificial Sequence: Synthetic oligonucleotide
ccaggggaggacaucauug

SEQ ID NO: 169 - RNA, 19 nt, Artificial Sequence
  Description of Artificial Sequence: Synthetic oligonucleotide
aggggaggacaucauuggu

SEQ ID NO: 170 - RNA, 19 nt, Artificial Sequence
  Description of Artificial Sequence: Synthetic oligonucleotide
ggggaggacaucauuggug

SEQ ID NO: 171 - RNA, 19 nt, Artificial Sequence
  Description of Artificial Sequence: Synthetic oligonucleotide
gaggacaucauuggugccu

SEQ ID NO: 172 - RNA, 19 nt, Artificial Sequence
  Description of Artificial Sequence: Synthetic oligonucleotide
aggacaucauuggugccuc

SEQ ID NO: 173 - RNA, 19 nt, Artificial Sequence
  Description of Artificial Sequence: Synthetic oligonucleotide
acaucauuggugccuccag

SEQ ID NO: 174 - RNA, 19 nt, Artificial Sequence
  Description of Artificial Sequence: Synthetic oligonucleotide
cauuggugccuccagcgac

SEQ ID NO: 175 - RNA, 19 nt, Artificial Sequence
  Description of Artificial Sequence: Synthetic oligonucleotide
auuggugccuccagcgacu

SEQ ID NO: 176 - RNA, 19 nt, Artificial Sequence
  Description of Artificial Sequence: Synthetic oligonucleotide
uuggugccuccagcgacug

SEQ ID NO: 177 - RNA, 19 nt, Artificial Sequence
  Description of Artificial Sequence: Synthetic oligonucleotide
uccagcgacugcagcaccu

SEQ ID NO: 178 - RNA, 19 nt, Artificial Sequence
  Description of Artificial Sequence: Synthetic oligonucleotide
agcgacugcagcaccugcu

SEQ ID NO: 179 - RNA, 19 nt, Artificial Sequence
  Description of Artificial Sequence: Synthetic oligonucleotide
gcgacugcagcaccugcuu

SEQ ID NO: 180 - RNA, 19 nt, Artificial Sequence
  Description of Artificial Sequence: Synthetic oligonucleotide
cgacugcagcaccugcuuu

SEQ ID NO: 181 - RNA, 19 nt, Artificial Sequence
  Description of Artificial Sequence: Synthetic oligonucleotide
gacugcagcaccugcuuug

SEQ ID NO: 182 - RNA, 19 nt, Artificial Sequence
  Description of Artificial Sequence: Synthetic oligonucleotide
acugcagcaccugcuuugu

SEQ ID NO: 183 - RNA, 19 nt, Artificial Sequence
  Description of Artificial Sequence: Synthetic oligonucleotide
cugcagcaccugcuuugug

SEQ ID NO: 184 - RNA, 19 nt, Artificial Sequence
  Description of Artificial Sequence: Synthetic oligonucleotide
ugcagcaccugcuuugugu

SEQ ID NO: 185 - RNA, 19 nt, Artificial Sequence
  Description of Artificial Sequence: Synthetic oligonucleotide
gcagcaccugcuuuguguc

SEQ ID NO: 186 - RNA, 19 nt, Artificial Sequence
  Description of Artificial Sequence: Synthetic oligonucleotide
cagcaccugcuuuguguca

SEQ ID NO: 187 - RNA, 19 nt, Artificial Sequence
  Description of Artificial Sequence: Synthetic oligonucleotide
ugcccacguggcuggcauu

SEQ ID NO: 188 - RNA, 19 nt, Artificial Sequence
  Description of Artificial Sequence: Synthetic oligonucleotide
ccacguggcuggcauugca

SEQ ID NO: 189 - RNA, 19 nt, Artificial Sequence
  Description of Artificial Sequence: Synthetic oligonucleotide
cacguggcuggcauugcag

SEQ ID NO: 190 - RNA, 19 nt, Artificial Sequence
  Description of Artificial Sequence: Synthetic oligonucleotide
guggcuggcauugcagcca

SEQ ID NO: 191 - RNA, 19 nt, Artificial Sequence
  Description of Artificial Sequence: Synthetic oligonucleotide
uggcuggcauugcagccau

SEQ ID NO: 192 - RNA, 19 nt, Artificial Sequence
  Description of Artificial Sequence: Synthetic oligonucleotide
ggcuggcauugcagccaug

SEQ ID NO: 193 - RNA, 19 nt, Artificial Sequence
  Description of Artificial Sequence: Synthetic oligonucleotide
gcuggcauugcagccauga

SEQ ID NO: 194 - RNA, 19 nt, Artificial Sequence
  Description of Artificial Sequence: Synthetic oligonucleotide
cuggcauugcagccaugau

SEQ ID NO: 195 - RNA, 19 nt, Artificial Sequence
  Description of Artificial Sequence: Synthetic oligonucleotide
uggcauugcagccaugaug

SEQ ID NO: 196 - RNA, 19 nt, Artificial Sequence
  Description of Artificial Sequence: Synthetic oligonucleotide
gcauugcagccaugaugcu

SEQ ID NO: 197 - RNA, 19 nt, Artificial Sequence
  Description of Artificial Sequence: Synthetic oligonucleotide
cauugcagccaugaugcug

SEQ ID NO: 198 - RNA, 19 nt, Artificial Sequence
  Description of Artificial Sequence: Synthetic oligonucleotide
auugcagccaugaugcugu

SEQ ID NO: 199 - RNA, 19 nt, Artificial Sequence
  Description of Artificial Sequence: Synthetic oligonucleotide
uugcagccaugaugcuguc

SEQ ID NO: 200 - RNA, 19 nt, Artificial Sequence
  Description of Artificial Sequence: Synthetic oligonucleotide
ugcagccaugaugcugucu

SEQ ID NO: 201 - RNA, 19 nt, Artificial Sequence
  Description of Artificial Sequence: Synthetic oligonucleotide
gcagccaugaugcugucug

SEQ ID NO: 202 - RNA, 19 nt, Artificial Sequence
  Description of Artificial Sequence: Synthetic oligonucleotide
ccaugaugcugucugccga

SEQ ID NO: 203 - RNA, 19 nt, Artificial Sequence
  Description of Artificial Sequence: Synthetic oligonucleotide
caugaugcugucugccgag

SEQ ID NO: 204 - RNA, 19 nt, Artificial Sequence
  Description of Artificial Sequence: Synthetic oligonucleotide
cuggccgaguugaggcaga

SEQ ID NO: 205 - RNA, 19 nt, Artificial Sequence
  Description of Artificial Sequence: Synthetic oligonucleotide
uggccgaguugaggcagag

SEQ ID NO: 206 - RNA, 19 nt, Artificial Sequence
  Description of Artificial Sequence: Synthetic oligonucleotide
ggccgaguugaggcagaga

SEQ ID NO: 207 - RNA, 19 nt, Artificial Sequence
  Description of Artificial Sequence: Synthetic oligonucleotide
gccgaguugaggcagagac

SEQ ID NO: 208 - RNA, 19 nt, Artificial Sequence
  Description of Artificial Sequence: Synthetic oligonucleotide
ccgaguugaggcagagacu

SEQ ID NO: 209 - RNA, 19 nt, Artificial Sequence
  Description of Artificial Sequence: Synthetic oligonucleotide
cgaguugaggcagagacug

SEQ ID NO: 210 - RNA, 19 nt, Artificial Sequence
  Description of Artificial Sequence: Synthetic oligonucleotide
gaguugaggcagagacuga

SEQ ID NO: 211 - RNA, 19 nt, Artificial Sequence
  Description of Artificial Sequence: Synthetic oligonucleotide
aguugaggcagagacugau

SEQ ID NO: 212 - RNA, 19 nt, Artificial Sequence
  Description of Artificial Sequence: Synthetic oligonucleotide
ugaggcagagacugaucca

SEQ ID NO: 213 - RNA, 19 nt, Artificial Sequence
  Description of Artificial Sequence: Synthetic oligonucleotide
gaggcagagacugauccac

SEQ ID NO: 214 - RNA, 19 nt, Artificial Sequence
  Description of Artificial Sequence: Synthetic oligonucleotide
aggcagagacugauccacu

SEQ ID NO: 215 - RNA, 19 nt, Artificial Sequence
  Description of Artificial Sequence: Synthetic oligonucleotide
ggcagagacugauccacuu

SEQ ID NO: 216 - RNA, 19 nt, Artificial Sequence
  Description of Artificial Sequence: Synthetic oligonucleotide
cagagacugauccacuucu

SEQ ID NO: 217 - RNA, 19 nt, Artificial Sequence
  Description of Artificial Sequence: Synthetic oligonucleotide
gagacugauccacuucucu

SEQ ID NO: 218 - RNA, 19 nt, Artificial Sequence
  Description of Artificial Sequence: Synthetic oligonucleotide
agacugauccacuucucug

SEQ ID NO: 219 - RNA, 19 nt, Artificial Sequence
  Description of Artificial Sequence: Synthetic oligonucleotide
cugauccacuucucugcca

SEQ ID NO: 220 - RNA, 19 nt, Artificial Sequence
  Description of Artificial Sequence: Synthetic oligonucleotide
ugauccacuucucugccaa

SEQ ID NO: 221 - RNA, 19 nt, Artificial Sequence
  Description of Artificial Sequence: Synthetic oligonucleotide
gauccacuucucugccaaa

SEQ ID NO: 222 - RNA, 19 nt, Artificial Sequence
  Description of Artificial Sequence: Synthetic oligonucleotide
auccacuucucugccaaag

SEQ ID NO: 223 - RNA, 19 nt, Artificial Sequence
  Description of Artificial Sequence: Synthetic oligonucleotide
uccacuucucugccaaaga

SEQ ID NO: 224 - RNA, 19 nt, Artificial Sequence
  Description of Artificial Sequence: Synthetic oligonucleotide
ccacuucucugccaaagau

SEQ ID NO: 225 - RNA, 19 nt, Artificial Sequence
  Description of Artificial Sequence: Synthetic oligonucleotide
cacuucucugccaaagaug

SEQ ID NO: 226 - RNA, 19 nt, Artificial Sequence
  Description of Artificial Sequence: Synthetic oligonucleotide
acuucucugccaaagaugu

SEQ ID NO: 227 - RNA, 19 nt, Artificial Sequence
  Description of Artificial Sequence: Synthetic oligonucleotide
cuucucugccaaagauguc

SEQ ID NO: 228 - RNA, 19 nt, Artificial Sequence
  Description of Artificial Sequence: Synthetic oligonucleotide
ucucugccaaagaugucau

SEQ ID NO: 229 - RNA, 19 nt, Artificial Sequence
  Description of Artificial Sequence: Synthetic oligonucleotide
ucugccaaagaugucauca

SEQ ID NO: 230 - RNA, 19 nt, Artificial Sequence
  Description of Artificial Sequence: Synthetic oligonucleotide
cugccaaagaugucaucaa

SEQ ID NO: 231 - RNA, 19 nt, Artificial Sequence
  Description of Artificial Sequence: Synthetic oligonucleotide
ugccaaagaugucaucaau

SEQ ID NO: 232 - RNA, 19 nt, Artificial Sequence
  Description of Artificial Sequence: Synthetic oligonucleotide
gccaaagaugucaucaaug

SEQ ID NO: 233 - RNA, 19 nt, Artificial Sequence
  Description of Artificial Sequence: Synthetic oligonucleotide
ccaaagaugucaucaauga

SEQ ID NO: 234 - RNA, 19 nt, Artificial Sequence
  Description of Artificial Sequence: Synthetic oligonucleotide
caaagaugucaucaaugag

SEQ ID NO: 235 - RNA, 19 nt, Artificial Sequence
  Description of Artificial Sequence: Synthetic oligonucleotide
gaugucaucaaugaggccu

SEQ ID NO: 236 - RNA, 19 nt, Artificial Sequence
  Description of Artificial Sequence: Synthetic oligonucleotide
augucaucaaugaggccug

SEQ ID NO: 237 - RNA, 19 nt, Artificial Sequence
  Description of Artificial Sequence: Synthetic oligonucleotide
gucaucaaugaggccuggu

SEQ ID NO: 238 - RNA, 19 nt, Artificial Sequence
  Description of Artificial Sequence: Synthetic oligonucleotide
ucaucaaugaggccugguu

SEQ ID NO: 239 - RNA, 19 nt, Artificial Sequence
  Description of Artificial Sequence: Synthetic oligonucleotide
caucaaugaggccugguuc

SEQ ID NO: 240 - RNA, 19 nt, Artificial Sequence
  Description of Artificial Sequence: Synthetic oligonucleotide
caaugaggccugguucccu

SEQ ID NO: 241 - RNA, 19 nt, Artificial Sequence
  Description of Artificial Sequence: Synthetic oligonucleotide
aaugaggccugguucccug

SEQ ID NO: 242 - RNA, 19 nt, Artificial Sequence
  Description of Artificial Sequence: Synthetic oligonucleotide
augaggccugguucccuga

SEQ ID NO: 243 - RNA, 19 nt, Artificial Sequence
  Description of Artificial Sequence: Synthetic oligonucleotide
ugaggccugguucccugag

SEQ ID NO: 244 - RNA, 19 nt, Artificial Sequence
  Description of Artificial Sequence: Synthetic oligonucleotide
aggccugguucccugagga

SEQ ID NO: 245 - RNA, 19 nt, Artificial Sequence
  Description of Artificial Sequence: Synthetic oligonucleotide
gaggaccagcggguacuga

SEQ ID NO: 246 - RNA, 19 nt, Artificial Sequence
  Description of Artificial Sequence: Synthetic oligonucleotide
aggaccagcggguacugac

SEQ ID NO: 247 - RNA, 19 nt, Artificial Sequence
  Description of Artificial Sequence: Synthetic oligonucleotide
gggcagguuggcagcuguu

SEQ ID NO: 248 - RNA, 19 nt, Artificial Sequence
  Description of Artificial Sequence: Synthetic oligonucleotide
ggcagguuggcagcuguuu

SEQ ID NO: 249 - RNA, 19 nt, Artificial Sequence
  Description of Artificial Sequence: Synthetic oligonucleotide
gcagguuggcagcuguuuu

SEQ ID NO: 250 - RNA, 19 nt, Artificial Sequence
  Description of Artificial Sequence: Synthetic oligonucleotide
agccuggaggagugagcca

SEQ ID NO: 251 - RNA, 19 nt, Artificial Sequence
  Description of Artificial Sequence: Synthetic oligonucleotide
uggaggagugagccaggca

SEQ ID NO: 252 - RNA, 19 nt, Artificial Sequence
  Description of Artificial Sequence: Synthetic oligonucleotide
gaggagugagccaggcagu

SEQ ID NO: 253 - RNA, 19 nt, Artificial Sequence
  Description of Artificial Sequence: Synthetic oligonucleotide
aggagugagccaggcagug

SEQ ID NO: 254 - RNA, 19 nt, Artificial Sequence
  Description of Artificial Sequence: Synthetic oligonucleotide
ggagugagccaggcaguga

SEQ ID NO: 255 - RNA, 19 nt, Artificial Sequence
  Description of Artificial Sequence: Synthetic oligonucleotide
gagugagccaggcagugag

SEQ ID NO: 256 - RNA, 19 nt, Artificial Sequence
  Description of Artificial Sequence: Synthetic oligonucleotide
agugagccaggcagugaga

SEQ ID NO: 257 - RNA, 19 nt, Artificial Sequence
  Description of Artificial Sequence: Synthetic oligonucleotide
gugagccaggcagugagac

SEQ ID NO: 258 - RNA, 19 nt, Artificial Sequence
  Description of Artificial Sequence: Synthetic oligonucleotide
ugagccaggcagugagacu

SEQ ID NO: 259 - RNA, 19 nt, Artificial Sequence
  Description of Artificial Sequence: Synthetic oligonucleotide
gagccaggcagugagacug

SEQ ID NO: 260 - RNA, 19 nt, Artificial Sequence
  Description of Artificial Sequence: Synthetic oligonucleotide
ccagcucccagccaggauu

SEQ ID NO: 261 - RNA, 19 nt, Artificial Sequence
  Description of Artificial Sequence: Synthetic oligonucleotide
cagcucccagccaggauuc

SEQ ID NO: 262 - RNA, 19 nt, Artificial Sequence
  Description of Artificial Sequence: Synthetic oligonucleotide
cagcuccugcacaguccuc

SEQ ID NO: 263 - RNA, 19 nt, Artificial Sequence
  Description of Artificial Sequence: Synthetic oligonucleotide
uccugcacaguccucccca

SEQ ID NO: 264 - RNA, 19 nt, Artificial Sequence
  Description of Artificial Sequence: Synthetic oligonucleotide
cacggccucuaggucuccu

SEQ ID NO: 265 - RNA, 19 nt, Artificial Sequence
  Description of Artificial Sequence: Synthetic oligonucleotide
acggccucuaggucuccuc

SEQ ID NO: 266 - RNA, 19 nt, Artificial Sequence
  Description of Artificial Sequence: Synthetic oligonucleotide
aggacgaggacggcgacua

SEQ ID NO: 267 - RNA, 19 nt, Artificial Sequence
  Description of Artificial Sequence: Synthetic oligonucleotide
acgaggacggcgacuacga

SEQ ID NO: 268 - RNA, 19 nt, Artificial Sequence
  Description of Artificial Sequence: Synthetic oligonucleotide
aggacggcgacuacgagga

SEQ ID NO: 269 - RNA, 19 nt, Artificial Sequence
  Description of Artificial Sequence: Synthetic oligonucleotide
acggcgacuacgaggagcu

SEQ ID NO: 270 - RNA, 19 nt, Artificial Sequence
  Description of Artificial Sequence: Synthetic oligonucleotide
gcgacuacgaggagcuggu

SEQ ID NO: 271 - RNA, 19 nt, Artificial Sequence
  Description of Artificial Sequence: Synthetic oligonucleotide
cgacuacgaggagcuggug

SEQ ID NO: 272 - RNA, 19 nt, Artificial Sequence
  Description of Artificial Sequence: Synthetic oligonucleotide
acuacgaggagcuggugcu

SEQ ID NO: 273 - RNA, 19 nt, Artificial Sequence
  Description of Artificial Sequence: Synthetic oligonucleotide
cuacgaggagcuggugcua

SEQ ID NO: 274 - RNA, 19 nt, Artificial Sequence
  Description of Artificial Sequence: Synthetic oligonucleotide
uacgaggagcuggugcuag

SEQ ID NO: 275 - RNA, 19 nt, Artificial Sequence
  Description of Artificial Sequence: Synthetic oligonucleotide
gaggagcuggugcuagccu

SEQ ID NO: 276 - RNA, 19 nt, Artificial Sequence
  Description of Artificial Sequence: Synthetic oligonucleotide
aggagcuggugcuagccuu

SEQ ID NO: 277 - RNA, 19 nt, Artificial Sequence
  Description of Artificial Sequence: Synthetic oligonucleotide
uggugcuagccuugcguuc

SEQ ID NO: 278 - RNA, 19 nt, Artificial Sequence
  Description of Artificial Sequence: Synthetic oligonucleotide
gcuagccuugcguuccgag

SEQ ID NO: 279 - RNA, 19 nt, Artificial Sequence
  Description of Artificial Sequence: Synthetic oligonucleotide
agccuugcguuccgaggag

SEQ ID NO: 280 - RNA, 19 nt, Artificial Sequence
  Description of Artificial Sequence: Synthetic oligonucleotide
ccuugcguuccgaggagga

SEQ ID NO: 281 - RNA, 19 nt, Artificial Sequence
  Description of Artificial Sequence: Synthetic oligonucleotide
cuugcguuccgaggaggac

SEQ ID NO: 282 - RNA, 19 nt, Artificial Sequence
  Description of Artificial Sequence: Synthetic oligonucleotide
acagccaccuuccaccgcu

SEQ ID NO: 283 - RNA, 19 nt, Artificial Sequence
  Description of Artificial Sequence: Synthetic oligonucleotide
ugcgccaaggauccgugga

SEQ ID NO: 284 - RNA, 19 nt, Artificial Sequence
  Description of Artificial Sequence: Synthetic oligonucleotide
gcaccuacgugguggugcu

SEQ ID NO: 285 - RNA, 19 nt, Artificial Sequence
  Description of Artificial Sequence: Synthetic oligonucleotide
caccuacgugguggugcug

SEQ ID NO: 286 - RNA, 19 nt, Artificial Sequence
  Description of Artificial Sequence: Synthetic oligonucleotide
accuacgugguggugcuga

SEQ ID NO: 287 - RNA, 19 nt, Artificial Sequence
  Description of Artificial Sequence: Synthetic oligonucleotide
ccuacgugguggugcugaa

SEQ ID NO: 288 - RNA, 19 nt, Artificial Sequence
  Description of Artificial Sequence: Synthetic oligonucleotide
cuacgugguggugcugaag

SEQ ID NO: 289 - RNA, 19 nt, Artificial Sequence
  Description of Artificial Sequence: Synthetic oligonucleotide
acgugguggugcugaagga

SEQ ID NO: 290 - RNA, 19 nt, Artificial Sequence
  Description of Artificial Sequence: Synthetic oligonucleotide
cgugguggugcugaaggag

SEQ ID NO: 291 - RNA, 19 nt, Artificial Sequence
  Description of Artificial Sequence: Synthetic oligonucleotide
ugguggugcugaaggagga

SEQ ID NO: 292 - RNA, 19 nt, Artificial Sequence
  Description of Artificial Sequence: Synthetic oligonucleotide
gguggugcugaaggaggag

SEQ ID NO: 293 - RNA, 19 nt, Artificial Sequence
  Description of Artificial Sequence: Synthetic oligonucleotide
guggugcugaaggaggaga

SEQ ID NO: 294 - RNA, 19 nt, Artificial Sequence
  Description of Artificial Sequence: Synthetic oligonucleotide
uggugcugaaggaggagac

SEQ ID NO: 295 - RNA, 19 nt, Artificial Sequence
  Description of Artificial Sequence: Synthetic oligonucleotide
ugcugaaggaggagaccca

SEQ ID NO: 296 - RNA, 19 nt, Artificial Sequence
  Description of Artificial Sequence: Synthetic oligonucleotide
gcugaaggaggagacccac

SEQ ID NO: 297 - RNA, 19 nt, Artificial Sequence
  Description of Artificial Sequence: Synthetic oligonucleotide
ucgcagucagagcgcacug

SEQ ID NO: 298 - RNA, 19 nt, Artificial Sequence
  Description of Artificial Sequence: Synthetic oligonucleotide
gccggggauaccucaccaa

SEQ ID NO: 299 - RNA, 19 nt, Artificial Sequence
  Description of Artificial Sequence: Synthetic oligonucleotide
ccggggauaccucaccaag

SEQ ID NO: 300 - RNA, 19 nt, Artificial Sequence
  Description of Artificial Sequence: Synthetic oligonucleotide
cggggauaccucaccaaga

SEQ ID NO: 301 - RNA, 19 nt, Artificial Sequence
  Description of Artificial Sequence: Synthetic oligonucleotide
ggggauaccucaccaagau

SEQ ID NO: 302 - RNA, 19 nt, Artificial Sequence
  Description of Artificial Sequence: Synthetic oligonucleotide
gauaccucaccaagauccu

SEQ ID NO: 303 - RNA, 19 nt, Artificial Sequence
  Description of Artificial Sequence: Synthetic oligonucleotide
auaccucaccaagauccug

SEQ ID NO: 304 - RNA, 19 nt, Artificial Sequence
  Description of Artificial Sequence: Synthetic oligonucleotide
accucaccaagauccugca

SEQ ID NO: 305 - RNA, 19 nt, Artificial Sequence
  Description of Artificial Sequence: Synthetic oligonucleotide
ccucaccaagauccugcau

SEQ ID NO: 306 - RNA, 19 nt, Artificial Sequence
  Description of Artificial Sequence: Synthetic oligonucleotide
cucaccaagauccugcaug

SEQ ID NO: 307 - RNA, 19 nt, Artificial Sequence
  Description of Artificial Sequence: Synthetic oligonucleotide
ucaccaagauccugcaugu

SEQ ID NO: 308 - RNA, 19 nt, Artificial Sequence
  Description of Artificial Sequence: Synthetic oligonucleotide
caccaagauccugcauguc

SEQ ID NO: 309 - RNA, 19 nt, Artificial Sequence
  Description of Artificial Sequence: Synthetic oligonucleotide
accaagauccugcaugucu

SEQ ID NO: 310 - RNA, 19 nt, Artificial Sequence
  Description of Artificial Sequence: Synthetic oligonucleotide
ccaagauccugcaugucuu

SEQ ID NO: 311 - RNA, 19 nt, Artificial Sequence
  Description of Artificial Sequence: Synthetic oligonucleotide
caagauccugcaugucuuc

SEQ ID NO: 312 - RNA, 19 nt, Artificial Sequence
  Description of Artificial Sequence: Synthetic oligonucleotide
agauccugcaugucuucca

SEQ ID NO: 313 - RNA, 19 nt, Artificial Sequence
  Description of Artificial Sequence: Synthetic oligonucleotide
gauccugcaugucuuccau

SEQ ID NO: 314 - RNA, 19 nt, Artificial Sequence
  Description of Artificial Sequence: Synthetic oligonucleotide
ccuucuuccuggcuuccug

SEQ ID NO: 315 - RNA, 19 nt, Artificial Sequence
  Description of Artificial Sequence: Synthetic oligonucleotide
uucuuccuggcuuccuggu

SEQ ID NO: 316 - RNA, 19 nt, Artificial Sequence
  Description of Artificial Sequence: Synthetic oligonucleotide
ucuuccuggcuuccuggug

SEQ ID NO: 317 - RNA, 19 nt, Artificial Sequence
  Description of Artificial Sequence: Synthetic oligonucleotide
cuuccuggcuuccugguga

SEQ ID NO: 318 - RNA, 19 nt, Artificial Sequence
  Description of Artificial Sequence: Synthetic oligonucleotide
uuccuggcuuccuggugaa

SEQ ID NO: 319 - RNA, 19 nt, Artificial Sequence
  Description of Artificial Sequence: Synthetic oligonucleotide
uccuggcuuccuggugaag

SEQ ID NO: 320 - RNA, 19 nt, Artificial Sequence
  Description of Artificial Sequence: Synthetic oligonucleotide
ccuggcuuccuggugaaga

SEQ ID NO: 321 - RNA, 19 nt, Artificial Sequence
  Description of Artificial Sequence: Synthetic oligonucleotide
cuggcuuccuggugaagau

SEQ ID NO: 322 - RNA, 19 nt, Artificial Sequence
  Description of Artificial Sequence: Synthetic oligonucleotide
uggcuuccuggugaagaug

SEQ ID NO: 323 - RNA, 19 nt, Artificial Sequence
  Description of Artificial Sequence: Synthetic oligonucleotide
ggcuuccuggugaagauga

SEQ ID NO: 324 - RNA, 19 nt, Artificial Sequence
  Description of Artificial Sequence: Synthetic oligonucleotide
gcuuccuggugaagaugag

SEQ ID NO: 325 - RNA, 19 nt, Artificial Sequence
  Description of Artificial Sequence: Synthetic oligonucleotide
cuuccuggugaagaugagu

SEQ ID NO: 326 - RNA, 19 nt, Artificial Sequence
  Description of Artificial Sequence: Synthetic oligonucleotide
uuccuggugaagaugagug

SEQ ID NO: 327 - RNA, 19 nt, Artificial Sequence
  Description of Artificial Sequence: Synthetic oligonucleotide
ggugaagaugaguggcgac

SEQ ID NO: 328 - RNA, 19 nt, Artificial Sequence
  Description of Artificial Sequence: Synthetic oligonucleotide
ugaagaugaguggcgaccu

SEQ ID NO: 329 - RNA, 19 nt, Artificial Sequence
  Description of Artificial Sequence: Synthetic oligonucleotide
agaugaguggcgaccugcu

SEQ ID NO: 330 - RNA, 19 nt, Artificial Sequence
  Description of Artificial Sequence: Synthetic oligonucleotide
gaugaguggcgaccugcug

SEQ ID NO: 331 - RNA, 19 nt, Artificial Sequence
  Description of Artificial Sequence: Synthetic oligonucleotide
ugaguggcgaccugcugga

SEQ ID NO: 332 - RNA, 19 nt, Artificial Sequence
  Description of Artificial Sequence: Synthetic oligonucleotide
ugaaguugccccaugucga

SEQ ID NO: 333 - RNA, 19 nt, Artificial Sequence
  Description of Artificial Sequence: Synthetic oligonucleotide
gaaguugccccaugucgac

SEQ ID NO: 334 - RNA, 19 nt, Artificial Sequence
  Description of Artificial Sequence: Synthetic oligonucleotide
aaguugccccaugucgacu

SEQ ID NO: 335 - RNA, 19 nt, Artificial Sequence
  Description of Artificial Sequence: Synthetic oligonucleotide
aguugccccaugucgacua

SEQ ID NO: 336 - RNA, 19 nt, Artificial Sequence
  Description of Artificial Sequence: Synthetic oligonucleotide
guugccccaugucgacuac

SEQ ID NO: 337 - RNA, 19 nt, Artificial Sequence
  Description of Artificial Sequence: Synthetic oligonucleotide
uugccccaugucgacuaca

SEQ ID NO: 338 - RNA, 19 nt, Artificial Sequence
  Description of Artificial Sequence: Synthetic oligonucleotide
ugccccaugucgacuacau

SEQ ID NO: 339 - RNA, 19 nt, Artificial Sequence
  Description of Artificial Sequence: Synthetic oligonucleotide
gccccaugucgacuacauc

SEQ ID NO: 340 - RNA, 19 nt, Artificial Sequence
  Description of Artificial Sequence: Synthetic oligonucleotide
ccaugucgacuacaucgag

SEQ ID NO: 341 - RNA, 19 nt, Artificial Sequence
  Description of Artificial Sequence: Synthetic oligonucleotide
augucgacuacaucgagga

SEQ ID NO: 342 - RNA, 19 nt, Artificial Sequence
  Description of Artificial Sequence: Synthetic oligonucleotide
ugucgacuacaucgaggag

SEQ ID NO: 343 - RNA, 19 nt, Artificial Sequence
  Description of Artificial Sequence: Synthetic oligonucleotide
ucgacuacaucgaggagga

SEQ ID NO: 344 - RNA, 19 nt, Artificial Sequence
  Description of Artificial Sequence: Synthetic oligonucleotide
cgacuacaucgaggaggac

SEQ ID NO: 345 - RNA, 19 nt, Artificial Sequence
  Description of Artificial Sequence: Synthetic oligonucleotide
gacuacaucgaggaggacu

SEQ ID NO: 346 - RNA, 19 nt, Artificial Sequence
  Description of Artificial Sequence: Synthetic oligonucleotide
cacacagcuccaccagcug

SEQ ID NO: 347 - RNA, 19 nt, Artificial Sequence
  Description of Artificial Sequence: Synthetic oligonucleotide
auggggacccguguccacu

SEQ ID NO: 348 - RNA, 19 nt, Artificial Sequence
  Description of Artificial Sequence: Synthetic oligonucleotide
cacguccucacaggcugca

SEQ ID NO: 349 - RNA, 19 nt, Artificial Sequence
  Description of Artificial Sequence: Synthetic oligonucleotide
acguccucacaggcugcag

SEQ ID NO: 350 - RNA, 19 nt, Artificial Sequence
  Description of Artificial Sequence: Synthetic oligonucleotide
guccucacaggcugcagcu

SEQ ID NO: 351 - RNA, 19 nt, Artificial Sequence
  Description of Artificial Sequence: Synthetic oligonucleotide
uccucacaggcugcagcuc

SEQ ID NO: 352 - RNA, 19 nt, Artificial Sequence
  Description of Artificial Sequence: Synthetic oligonucleotide
ucacaggcugcagcuccca

SEQ ID NO: 353 - RNA, 19 nt, Artificial Sequence
  Description of Artificial Sequence: Synthetic oligonucleotide
acaggcugcagcucccacu

SEQ ID NO: 354 - RNA, 19 nt, Artificial Sequence
  Description of Artificial Sequence: Synthetic oligonucleotide
acugggagguggaggaccu

SEQ ID NO: 355 - RNA, 19 nt, Artificial Sequence
  Description of Artificial Sequence: Synthetic oligonucleotide
cugggagguggaggaccuu

SEQ ID NO: 356 - RNA, 19 nt, Artificial Sequence
  Description of Artificial Sequence: Synthetic oligonucleotide
ugggagguggaggaccuug

SEQ ID NO: 357 - RNA, 19 nt, Artificial Sequence
  Description of Artificial Sequence: Synthetic oligonucleotide
gagguggaggaccuuggca

SEQ ID NO: 358 - RNA, 19 nt, Artificial Sequence
  Description of Artificial Sequence: Synthetic oligonucleotide
agguggaggaccuuggcac

SEQ ID NO: 359 - RNA, 19 nt, Artificial Sequence
  Description of Artificial Sequence: Synthetic oligonucleotide
uggaggaccuuggcaccca

SEQ ID NO: 360 - RNA, 19 nt, Artificial Sequence
  Description of Artificial Sequence: Synthetic oligonucleotide
gaggaccuuggcacccaca

SEQ ID NO: 361 - RNA, 19 nt, Artificial Sequence
  Description of Artificial Sequence: Synthetic oligonucleotide
aggaccuuggcacccacaa

SEQ ID NO: 362 - RNA, 19 nt, Artificial Sequence
  Description of Artificial Sequence: Synthetic oligonucleotide
ggaccuuggcacccacaag

SEQ ID NO: 363 - RNA, 19 nt, Artificial Sequence
  Description of Artificial Sequence: Synthetic oligonucleotide
cacaagccgccugugcuga

SEQ ID NO: 364 - RNA, 19 nt, Artificial Sequence
  Description of Artificial Sequence: Synthetic oligonucleotide
acaagccgccugugcugag

SEQ ID NO: 365 - RNA, 19 nt, Artificial Sequence
  Description of Artificial Sequence: Synthetic oligonucleotide
ugugcugaggccacgaggu

SEQ ID NO: 366 - RNA, 19 nt, Artificial Sequence
  Description of Artificial Sequence: Synthetic oligonucleotide
cacgaggucagcccaacca

SEQ ID NO: 367 - RNA, 19 nt, Artificial Sequence
  Description of Artificial Sequence: Synthetic oligonucleotide
acgaggucagcccaaccag

SEQ ID NO: 368 - RNA, 19 nt, Artificial Sequence
  Description of Artificial Sequence: Synthetic oligonucleotide
gaggucagcccaaccagug

SEQ ID NO: 369 - RNA, 19 nt, Artificial Sequence
  Description of Artificial Sequence: Synthetic oligonucleotide
acagggaggccagcaucca

SEQ ID NO: 370 - RNA, 19 nt, Artificial Sequence
  Description of Artificial Sequence: Synthetic oligonucleotide
gaggccagcauccacgcuu

SEQ ID NO: 371 - RNA, 19 nt, Artificial Sequence
  Description of Artificial Sequence: Synthetic oligonucleotide
aggccagcauccacgcuuc

SEQ ID NO: 372 - RNA, 19 nt, Artificial Sequence
  Description of Artificial Sequence: Synthetic oligonucleotide
gccagcauccacgcuuccu

SEQ ID NO: 373 - RNA, 19 nt, Artificial Sequence
  Description of Artificial Sequence: Synthetic oligonucleotide
agcauccacgcuuccugcu

SEQ ID NO: 374 - RNA, 19 nt, Artificial Sequence
  Description of Artificial Sequence: Synthetic oligonucleotide
gcauccacgcuuccugcug

SEQ ID NO: 375 - RNA, 19 nt, Artificial Sequence
  Description of Artificial Sequence: Synthetic oligonucleotide
uccacgcuuccugcugcca

SEQ ID NO: 376 - RNA, 19 nt, Artificial Sequence
  Description of Artificial Sequence: Synthetic oligonucleotide
ccacgcuuccugcugccau

SEQ ID NO: 377 - RNA, 19 nt, Artificial Sequence
  Description of Artificial Sequence: Synthetic oligonucleotide
cacgcuuccugcugccaug

SEQ ID NO: 378 - RNA, 19 nt, Artificial Sequence
  Description of Artificial Sequence: Synthetic oligonucleotide
uuccugcugccaugcccca

SEQ ID NO: 379 - RNA, 19 nt, Artificial Sequence
  Description of Artificial Sequence: Synthetic oligonucleotide
ccaugccccaggucuggaa

SEQ ID NO: 380 - RNA, 19 nt, Artificial Sequence
  Description of Artificial Sequence: Synthetic oligonucleotide
caugccccaggucuggaau

SEQ ID NO: 381 - RNA, 19 nt, Artificial Sequence
  Description of Artificial Sequence: Synthetic oligonucleotide
augccccaggucuggaaug

SEQ ID NO: 382 - RNA, 19 nt, Artificial Sequence
  Description of Artificial Sequence: Synthetic oligonucleotide
gccccaggucuggaaugca

SEQ ID NO: 383 - RNA, 19 nt, Artificial Sequence
  Description of Artificial Sequence: Synthetic oligonucleotide
ccccaggucuggaaugcaa

SEQ ID NO: 384 - RNA, 19 nt, Artificial Sequence
  Description of Artificial Sequence: Synthetic oligonucleotide
ccaggucuggaaugcaaag

SEQ ID NO: 385 - RNA, 19 nt, Artificial Sequence
  Description of Artificial Sequence: Synthetic oligonucleotide
caggucuggaaugcaaagu

SEQ ID NO: 386 - RNA, 19 nt, Artificial Sequence
  Description of Artificial Sequence: Synthetic oligonucleotide
aggucuggaaugcaaaguc

SEQ ID NO: 387 - RNA, 19 nt, Artificial Sequence
  Description of Artificial Sequence: Synthetic oligonucleotide
ggucuggaaugcaaaguca

SEQ ID NO: 388 - RNA, 19 nt, Artificial Sequence
  Description of Artificial Sequence: Synthetic oligonucleotide
gucuggaaugcaaagucaa

SEQ ID NO: 389 - RNA, 19 nt, Artificial Sequence
  Description of Artificial Sequence: Synthetic oligonucleotide
ucuggaaugcaaagucaag

SEQ ID NO: 390 - RNA, 19 nt, Artificial Sequence
  Description of Artificial Sequence: Synthetic oligonucleotide
uggaaugcaaagucaagga

SEQ ID NO: 391 - RNA, 19 nt, Artificial Sequence
  Description of Artificial Sequence: Synthetic oligonucleotide
ggaaugcaaagucaaggag

SEQ ID NO: 392 - RNA, 19 nt, Artificial Sequence
  Description of Artificial Sequence: Synthetic oligonucleotide
aaugcaaagucaaggagca

SEQ ID NO: 393 - RNA, 19 nt, Artificial Sequence
  Description of Artificial Sequence: Synthetic oligonucleotide
augcaaagucaaggagcau

SEQ ID NO: 394 - RNA, 19 nt, Artificial Sequence
  Description of Artificial Sequence: Synthetic oligonucleotide
ugcaaagucaaggagcaug

SEQ ID NO: 395 - RNA, 19 nt, Artificial Sequence
  Description of Artificial Sequence: Synthetic oligonucleotide
caaagucaaggagcaugga

SEQ ID NO: 396 - RNA, 19 nt, Artificial Sequence
  Description of Artificial Sequence: Synthetic oligonucleotide
aaagucaaggagcauggaa

SEQ ID NO: 397 - RNA, 19 nt, Artificial Sequence
  Description of Artificial Sequence: Synthetic oligonucleotide
aagucaaggagcauggaau

SEQ ID NO: 398 - RNA, 19 nt, Artificial Sequence
  Description of Artificial Sequence: Synthetic oligonucleotide
auggaaucccggccccuca

SEQ ID NO: 399 - RNA, 19 nt, Artificial Sequence
  Description of Artificial Sequence: Synthetic oligonucleotide
acaggcagcaccagcgaag

SEQ ID NO: 400 - RNA, 19 nt, Artificial Sequence
  Description of Artificial Sequence: Synthetic oligonucleotide
cagccguugccaucugcug

SEQ ID NO: 401 - RNA, 19 nt, Artificial Sequence
  Description of Artificial Sequence: Synthetic oligonucleotide
guugccaucugcugccgga

SEQ ID NO: 402 - RNA, 19 nt, Artificial Sequence
  Description of Artificial Sequence: Synthetic oligonucleotide
uugccaucugcugccggag

SEQ ID NO: 403 - RNA, 19 nt, Artificial Sequence
  Description of Artificial Sequence: Synthetic oligonucleotide
cucccaggagcuccaguga

SEQ ID NO: 404 - RNA, 19 nt, Artificial Sequence
  Description of Artificial Sequence: Synthetic oligonucleotide
ucccaggagcuccagugac

SEQ ID NO: 405 - RNA, 19 nt, Artificial Sequence
  Description of Artificial Sequence: Synthetic oligonucleotide
cccaggagcuccagugaca

SEQ ID NO: 406 - RNA, 19 nt, Artificial Sequence
  Description of Artificial Sequence: Synthetic oligonucleotide
ccaggagcuccagugacag

SEQ ID NO: 407 - RNA, 19 nt, Artificial Sequence
  Description of Artificial Sequence: Synthetic oligonucleotide
agcuccagugacagcccca

SEQ ID NO: 408 - RNA, 19 nt, Artificial Sequence
  Description of Artificial Sequence: Synthetic oligonucleotide
gcuccagugacagccccau

SEQ ID NO: 409 - RNA, 19 nt, Artificial Sequence
  Description of Artificial Sequence: Synthetic oligonucleotide
cuccagugacagccccauc

SEQ ID NO: 410 - RNA, 19 nt, Artificial Sequence
  Description of Artificial Sequence: Synthetic oligonucleotide
cagugacagccccauccca

SEQ ID NO: 411 - RNA, 19 nt, Artificial Sequence
  Description of Artificial Sequence: Synthetic oligonucleotide
agugacagccccaucccag

SEQ ID NO: 412 - RNA, 19 nt, Artificial Sequence
  Description of Artificial Sequence: Synthetic oligonucleotide
ugacagccccaucccagga

SEQ ID NO: 413 - RNA, 19 nt, Artificial Sequence
  Description of Artificial Sequence: Synthetic oligonucleotide
gacagccccaucccaggau

SEQ ID NO: 414 - RNA, 19 nt, Artificial Sequence
  Description of Artificial Sequence: Synthetic oligonucleotide
acagccccaucccaggaug

SEQ ID NO: 415 - RNA, 19 nt, Artificial Sequence
  Description of Artificial Sequence: Synthetic oligonucleotide
gggcuggggcugagcuuua

SEQ ID NO: 416 - RNA, 19 nt, Artificial Sequence
  Description of Artificial Sequence: Synthetic oligonucleotide
ggcuggggcugagcuuuaa

SEQ ID NO: 417 - RNA, 19 nt, Artificial Sequence
  Description of Artificial Sequence: Synthetic oligonucleotide
gcuggggcugagcuuuaaa

SEQ ID NO: 418 - RNA, 19 nt, Artificial Sequence
  Description of Artificial Sequence: Synthetic oligonucleotide
ggcugagcuuuaaaauggu

SEQ ID NO: 419 - RNA, 19 nt, Artificial Sequence
  Description of Artificial Sequence: Synthetic oligonucleotide
gcugagcuuuaaaaugguu

SEQ ID NO: 420 - RNA, 19 nt, Artificial Sequence
  Description of Artificial Sequence: Synthetic oligonucleotide
cugagcuuuaaaaugguuc

SEQ ID NO: 421 - RNA, 19 nt, Artificial Sequence
  Description of Artificial Sequence: Synthetic oligonucleotide
guggaggugccaggaagcu

SEQ ID NO: 422 - RNA, 19 nt, Artificial Sequence
  Description of Artificial Sequence: Synthetic oligonucleotide
uggaggugccaggaagcuc

SEQ ID NO: 423 - RNA, 19 nt, Artificial Sequence
  Description of Artificial Sequence: Synthetic oligonucleotide
aggugccaggaagcucccu

SEQ ID NO: 424 - RNA, 19 nt, Artificial Sequence
  Description of Artificial Sequence: Synthetic oligonucleotide
ucacuguggggcauuucac

SEQ ID NO: 425 - RNA, 19 nt, Artificial Sequence
  Description of Artificial Sequence: Synthetic oligonucleotide
acuguggggcauuucacca

SEQ ID NO: 426 - RNA, 19 nt, Artificial Sequence
  Description of Artificial Sequence: Synthetic oligonucleotide
cuguggggcauuucaccau

SEQ ID NO: 427 - RNA, 19 nt, Artificial Sequence
  Description of Artificial Sequence: Synthetic oligonucleotide
uguggggcauuucaccauu

SEQ ID NO: 428 - RNA, 19 nt, Artificial Sequence
  Description of Artificial Sequence: Synthetic oligonucleotide
ugcugccagcugcucccaa

SEQ ID NO: 429 - RNA, 19 nt, Artificial Sequence
  Description of Artificial Sequence: Synthetic oligonucleotide
cuuuuauugagcucuuguu

SEQ ID NO: 430 - RNA, 19 nt, Artificial Sequence
  Description of Artificial Sequence: Synthetic oligonucleotide
gucuccaccaaggaggcag

SEQ ID NO: 431 - RNA, 19 nt, Artificial Sequence
  Description of Artificial Sequence: Synthetic oligonucleotide
cuccaccaaggaggcagga

SEQ ID NO: 432 - RNA, 19 nt, Artificial Sequence
  Description of Artificial Sequence: Synthetic oligonucleotide
uccaccaaggaggcaggau

SEQ ID NO: 433 - RNA, 19 nt, Artificial Sequence
  Description of Artificial Sequence: Synthetic oligonucleotide
ccaccaaggaggcaggauu

SEQ ID NO: 434 - RNA, 19 nt, Artificial Sequence
  Description of Artificial Sequence: Synthetic oligonucleotide
accaaggaggcaggauucu

SEQ ID NO: 435 - RNA, 19 nt, Artificial Sequence
  Description of Artificial Sequence: Synthetic oligonucleotide
ccaaggaggcaggauucuu

SEQ ID NO: 436 - RNA, 19 nt, Artificial Sequence
  Description of Artificial Sequence: Synthetic oligonucleotide
caaggaggcaggauucuuc

SEQ ID NO: 437 - RNA, 19 nt, Artificial Sequence
  Description of Artificial Sequence: Synthetic oligonucleotide
ggaggcaggauucuuccca

SEQ ID NO: 438 - RNA, 19 nt, Artificial Sequence
  Description of Artificial Sequence: Synthetic oligonucleotide
gaggcaggauucuucccau

SEQ ID NO: 439 - RNA, 19 nt, Artificial Sequence
  Description of Artificial Sequence: Synthetic oligonucleotide
aggcaggauucuucccaug

SEQ ID NO: 440 - RNA, 19 nt, Artificial Sequence
  Description of Artificial Sequence: Synthetic oligonucleotide
ugcugauggcccucaucuc

SEQ ID NO: 441 - RNA, 19 nt, Artificial Sequence
  Description of Artificial Sequence: Synthetic oligonucleotide
cugauggcccucaucucca

SEQ ID NO: 442 - RNA, 19 nt, Artificial Sequence
  Description of Artificial Sequence: Synthetic oligonucleotide
ugauggcccucaucuccag

SEQ ID NO: 443 - RNA, 19 nt, Artificial Sequence
  Description of Artificial Sequence: Synthetic oligonucleotide
auggcccucaucuccagcu

SEQ ID NO: 444 - RNA, 19 nt, Artificial Sequence
  Description of Artificial Sequence: Synthetic oligonucleotide
agcuuucuggauggcaucu

SEQ ID NO: 445 - RNA, 19 nt, Artificial Sequence
  Description of Artificial Sequence: Synthetic oligonucleotide
gcuuucuggauggcaucua

SEQ ID NO: 446 - RNA, 19 nt, Artificial Sequence
  Description of Artificial Sequence: Synthetic oligonucleotide
cuuucuggauggcaucuag

SEQ ID NO: 447 - RNA, 19 nt, Artificial Sequence
  Description of Artificial Sequence: Synthetic oligonucleotide
cuggauggcaucuagccag

SEQ ID NO: 448 - RNA, 19 nt, Artificial Sequence
  Description of Artificial Sequence: Synthetic oligonucleotide
uggauggcaucuagccaga

SEQ ID NO: 449 - RNA, 19 nt, Artificial Sequence
  Description of Artificial Sequence: Synthetic oligonucleotide
ggauggcaucuagccagag

SEQ ID NO: 450 - RNA, 19 nt, Artificial Sequence
  Description of Artificial Sequence: Synthetic oligonucleotide
uggcaucuagccagaggcu

SEQ ID NO: 451 - RNA, 19 nt, Artificial Sequence
  Description of Artificial Sequence: Synthetic oligonucleotide
ggcaucuagccagaggcug

SEQ ID NO: 452 - RNA, 19 nt, Artificial Sequence
  Description of Artificial Sequence: Synthetic oligonucleotide
caucuagccagaggcugga

SEQ ID NO: 453 - RNA, 19 nt, Artificial Sequence
  Description of Artificial Sequence: Synthetic oligonucleotide
ucuagccagaggcuggaga

SEQ ID NO: 454 - RNA, 19 nt, Artificial Sequence
  Description of Artificial Sequence: Synthetic oligonucleotide
cucuaugccaggcugugcu

SEQ ID NO: 455 - RNA, 19 nt, Artificial Sequence
  Description of Artificial Sequence: Synthetic oligonucleotide
ucuaugccaggcugugcua

SEQ ID NO: 456 - RNA, 19 nt, Artificial Sequence
  Description of Artificial Sequence: Synthetic oligonucleotide
ucucagccaacccgcucca

SEQ ID NO: 457 - RNA, 19 nt, Artificial Sequence
  Description of Artificial Sequence: Synthetic oligonucleotide
ucagccaacccgcuccacu

SEQ ID NO: 458 - RNA, 19 nt, Artificial Sequence
  Description of Artificial Sequence: Synthetic oligonucleotide
cagccaacccgcuccacua

SEQ ID NO: 459 - RNA, 19 nt, Artificial Sequence
  Description of Artificial Sequence: Synthetic oligonucleotide
agccaacccgcuccacuac

SEQ ID NO: 460 - RNA, 19 nt, Artificial Sequence
  Description of Artificial Sequence: Synthetic oligonucleotide
ugccugccaagcucacaca

SEQ ID NO: 461 - RNA, 19 nt, Artificial Sequence
  Description of Artificial Sequence: Synthetic oligonucleotide
gccugccaagcucacacag

SEQ ID NO: 462 - RNA, 19 nt, Artificial Sequence
  Description of Artificial Sequence: Synthetic oligonucleotide
cugccaagcucacacagca

SEQ ID NO: 463 - RNA, 19 nt, Artificial Sequence
  Description of Artificial Sequence: Synthetic oligonucleotide
ugccaagcucacacagcag

SEQ ID NO: 464 - RNA, 19 nt, Artificial Sequence
  Description of Artificial Sequence: Synthetic oligonucleotide
ccaagcucacacagcagga

SEQ ID NO: 465 - RNA, 19 nt, Artificial Sequence
  Description of Artificial Sequence: Synthetic oligonucleotide
caagcucacacagcaggaa

SEQ ID NO: 466 - RNA, 19 nt, Artificial Sequence
  Description of Artificial Sequence: Synthetic oligonucleotide
aagcucacacagcaggaac

SEQ ID NO: 467 - RNA, 19 nt, Artificial Sequence
  Description of Artificial Sequence: Synthetic oligonucleotide
agcucacacagcaggaacu

SEQ ID NO: 468 - RNA, 19 nt, Artificial Sequence
  Description of Artificial Sequence: Synthetic oligonucleotide
gcucacacagcaggaacug

SEQ ID NO: 469 - RNA, 19 nt, Artificial Sequence
  Description of Artificial Sequence: Synthetic oligonucleotide
cucacacagcaggaacuga

SEQ ID NO: 470 - RNA, 19 nt, Artificial Sequence
  Description of Artificial Sequence: Synthetic oligonucleotide
ucacacagcaggaacugag

SEQ ID NO: 471 - RNA, 19 nt, Artificial Sequence
  Description of Artificial Sequence: Synthetic oligonucleotide
cacagcaggaacugagcca

SEQ ID NO: 472 - RNA, 19 nt, Artificial Sequence
  Description of Artificial Sequence: Synthetic oligonucleotide
acagcaggaacugagccag

SEQ ID NO: 473 - RNA, 19 nt, Artificial Sequence
  Description of Artificial Sequence: Synthetic oligonucleotide
cagcaggaacugagccaga

SEQ ID NO: 474 - RNA, 19 nt, Artificial Sequence
  Description of Artificial Sequence: Synthetic oligonucleotide
agcaggaacugagccagaa

SEQ ID NO: 475 - RNA, 19 nt, Artificial Sequence
  Description of Artificial Sequence: Synthetic oligonucleotide
gcaggaacugagccagaaa

SEQ ID NO: 476 - RNA, 19 nt, Artificial Sequence
  Description of Artificial Sequence: Synthetic oligonucleotide
caggaacugagccagaaac

SEQ ID NO: 477 - RNA, 19 nt, Artificial Sequence
  Description of Artificial Sequence: Synthetic oligonucleotide
cucugaagccaagccucuu

SEQ ID NO: 478 - RNA, 19 nt, Artificial Sequence
  Description of Artificial Sequence: Synthetic oligonucleotide
ucugaagccaagccucuuc

SEQ ID NO: 479 - RNA, 19 nt, Artificial Sequence
  Description of Artificial Sequence: Synthetic oligonucleotide
cugaagccaagccucuucu

SEQ ID NO: 480 - RNA, 19 nt, Artificial Sequence
  Description of Artificial Sequence: Synthetic oligonucleotide
ugaagccaagccucuucuu

SEQ ID NO: 481 - RNA, 19 nt, Artificial Sequence
  Description of Artificial Sequence: Synthetic oligonucleotide
gaagccaagccucuucuua

SEQ ID NO: 482 - RNA, 19 nt, Artificial Sequence
  Description of Artificial Sequence: Synthetic oligonucleotide
aagccaagccucuucuuac

SEQ ID NO: 483 - RNA, 19 nt, Artificial Sequence
  Description of Artificial Sequence: Synthetic oligonucleotide
gccaagccucuucuuacuu

SEQ ID NO: 484 - RNA, 19 nt, Artificial Sequence
  Description of Artificial Sequence: Synthetic oligonucleotide
gguaacagugaggcuggga

SEQ ID NO: 485 - RNA, 19 nt, Artificial Sequence
  Description of Artificial Sequence: Synthetic oligonucleotide
guaacagugaggcugggaa

SEQ ID NO: 486 - RNA, 19 nt, Artificial Sequence
  Description of Artificial Sequence: Synthetic oligonucleotide
uaacagugaggcugggaag

SEQ ID NO: 487 - RNA, 19 nt, Artificial Sequence
  Description of Artificial Sequence: Synthetic oligonucleotide
agugaggcugggaagggga

SEQ ID NO: 488 - RNA, 19 nt, Artificial Sequence
  Description of Artificial Sequence: Synthetic oligonucleotide
gugaggcugggaaggggaa

SEQ ID NO: 489 - RNA, 19 nt, Artificial Sequence
  Description of Artificial Sequence: Synthetic oligonucleotide
ugaggcugggaaggggaac

SEQ ID NO: 490 - RNA, 19 nt, Artificial Sequence
  Description of Artificial Sequence: Synthetic oligonucleotide
gaggcugggaaggggaaca

SEQ ID NO: 491 - RNA, 19 nt, Artificial Sequence
  Description of Artificial Sequence: Synthetic oligonucleotide
aggcugggaaggggaacac

SEQ ID NO: 492 - RNA, 19 nt, Artificial Sequence
  Description of Artificial Sequence: Synthetic oligonucleotide
ggcugggaaggggaacaca

SEQ ID NO: 493 - RNA, 19 nt, Artificial Sequence
  Description of Artificial Sequence: Synthetic oligonucleotide
gcugggaaggggaacacag

SEQ ID NO: 494 - RNA, 19 nt, Artificial Sequence
  Description of Artificial Sequence: Synthetic oligonucleotide
cugggaaggggaacacaga

SEQ ID NO: 495 - RNA, 19 nt, Artificial Sequence
  Description of Artificial Sequence: Synthetic oligonucleotide
ugggaaggggaacacagac

SEQ ID NO: 496 - RNA, 19 nt, Artificial Sequence
  Description of Artificial Sequence: Synthetic oligonucleotide
ggaaggggaacacagacca

SEQ ID NO: 497 - RNA, 19 nt, Artificial Sequence
  Description of Artificial Sequence: Synthetic oligonucleotide
gaaggggaacacagaccag

SEQ ID NO: 498 - RNA, 19 nt, Artificial Sequence
  Description of Artificial Sequence: Synthetic oligonucleotide
aggggaacacagaccagga

SEQ ID NO: 499 - RNA, 19 nt, Artificial Sequence
  Description of Artificial Sequence: Synthetic oligonucleotide
ggggaacacagaccaggaa

SEQ ID NO: 500 - RNA, 19 nt, Artificial Sequence
  Description of Artificial Sequence: Synthetic oligonucleotide
gggaacacagaccaggaag

SEQ ID NO: 501 - RNA, 19 nt, Artificial Sequence
  Description of Artificial Sequence: Synthetic oligonucleotide
gaacacagaccaggaagcu

SEQ ID NO: 502 - RNA, 19 nt, Artificial Sequence
  Description of Artificial Sequence: Synthetic oligonucleotide
aacacagaccaggaagcuc

SEQ ID NO: 503 - RNA, 19 nt, Artificial Sequence
  Description of Artificial Sequence: Synthetic oligonucleotide
acaacugucccuccuugag

SEQ ID NO: 504 - RNA, 19 nt, Artificial Sequence
  Description of Artificial Sequence: Synthetic oligonucleotide
aacugucccuccuugagca

SEQ ID NO: 505 - RNA, 19 nt, Artificial Sequence
  Description of Artificial Sequence: Synthetic oligonucleotide
ugucccuccuugagcacca

SEQ ID NO: 506 - RNA, 19 nt, Artificial Sequence
  Description of Artificial Sequence: Synthetic oligonucleotide
gucccuccuugagcaccag

SEQ ID NO: 507 - RNA, 19 nt, Artificial Sequence
  Description of Artificial Sequence: Synthetic oligonucleotide
uccuugagcaccagcccca

SEQ ID NO: 508 - RNA, 19 nt, Artificial Sequence
  Description of Artificial Sequence: Synthetic oligonucleotide
accagccccacccaagcaa

SEQ ID NO: 509 - RNA, 19 nt, Artificial Sequence
  Description of Artificial Sequence: Synthetic oligonucleotide
agccccacccaagcaagca

SEQ ID NO: 510 - RNA, 19 nt, Artificial Sequence
  Description of Artificial Sequence: Synthetic oligonucleotide
ccccacccaagcaagcaga

SEQ ID NO: 511 - RNA, 19 nt, Artificial Sequence
  Description of Artificial Sequence: Synthetic oligonucleotide
cccacccaagcaagcagac

SEQ ID NO: 512 - RNA, 19 nt, Artificial Sequence
  Description of Artificial Sequence: Synthetic oligonucleotide
ccacccaagcaagcagaca

SEQ ID NO: 513 - RNA, 19 nt, Artificial Sequence
  Description of Artificial Sequence: Synthetic oligonucleotide
cacccaagcaagcagacau

SEQ ID NO: 514 - RNA, 19 nt, Artificial Sequence
  Description of Artificial Sequence: Synthetic oligonucleotide
acccaagcaagcagacauu

SEQ ID NO: 515 - RNA, 19 nt, Artificial Sequence
  Description of Artificial Sequence: Synthetic oligonucleotide
cccaagcaagcagacauuu

SEQ ID NO: 516 - RNA, 19 nt, Artificial Sequence
  Description of Artificial Sequence: Synthetic oligonucleotide
ccaagcaagcagacauuua

SEQ ID NO: 517 - RNA, 19 nt, Artificial Sequence
  Description of Artificial Sequence: Synthetic oligonucleotide
caagcaagcagacauuuau

SEQ ID NO: 518 - RNA, 19 nt, Artificial Sequence
  Description of Artificial Sequence: Synthetic oligonucleotide
aagcaagcagacauuuauc

SEQ ID NO: 519 - RNA, 19 nt, Artificial Sequence
  Description of Artificial Sequence: Synthetic oligonucleotide
agcaagcagacauuuaucu

SEQ ID NO: 520 - RNA, 19 nt, Artificial Sequence
  Description of Artificial Sequence: Synthetic oligonucleotide
gcaagcagacauuuaucuu

SEQ ID NO: 521 - RNA, 19 nt, Artificial Sequence
  Description of Artificial Sequence: Synthetic oligonucleotide
caagcagacauuuaucuuu

SEQ ID NO: 522 - RNA, 19 nt, Artificial Sequence
  Description of Artificial Sequence: Synthetic oligonucleotide
aagcagacauuuaucuuuu

SEQ ID NO: 523 - RNA, 19 nt, Artificial Sequence
  Description of Artificial Sequence: Synthetic oligonucleotide
agcagacauuuaucuuuug

SEQ ID NO: 524 - RNA, 19 nt, Artificial Sequence
  Description of Artificial Sequence: Synthetic oligonucleotide
agacauuuaucuuuugggu

SEQ ID NO: 525 - RNA, 19 nt, Artificial Sequence
  Description of Artificial Sequence: Synthetic oligonucleotide
gacauuuaucuuuuggguc

SEQ ID NO: 526 - RNA, 19 nt, Artificial Sequence
  Description of Artificial Sequence: Synthetic oligonucleotide
aucuuuugggucuguccuc

SEQ ID NO: 527 - RNA, 19 nt, Artificial Sequence
  Description of Artificial Sequence: Synthetic oligonucleotide
ucuuuugggucuguccucu

SEQ ID NO: 528 - RNA, 19 nt, Artificial Sequence
  Description of Artificial Sequence: Synthetic oligonucleotide
cuuuugggucuguccucuc

SEQ ID NO: 529 - RNA, 19 nt, Artificial Sequence
  Description of Artificial Sequence: Synthetic oligonucleotide
uuuugggucuguccucucu

SEQ ID NO: 530 - RNA, 19 nt, Artificial Sequence
  Description of Artificial Sequence: Synthetic oligonucleotide
uuugggucuguccucucug

SEQ ID NO: 531 - RNA, 19 nt, Artificial Sequence
  Description of Artificial Sequence: Synthetic oligonucleotide
uugggucuguccucucugu

SEQ ID NO: 532 - RNA, 19 nt, Artificial Sequence
  Description of Artificial Sequence: Synthetic oligonucleotide
ugggucuguccucucuguu

SEQ ID NO: 533 - RNA, 19 nt, Artificial Sequence
  Description of Artificial Sequence: Synthetic oligonucleotide
gggucuguccucucuguug

SEQ ID NO: 534 - RNA, 19 nt, Artificial Sequence
  Description of Artificial Sequence: Synthetic oligonucleotide
ucuguccucucuguugccu

SEQ ID NO: 535 - RNA, 19 nt, Artificial Sequence
  Description of Artificial Sequence: Synthetic oligonucleotide
cuguccucucuguugccuu

SEQ ID NO: 536 - RNA, 19 nt, Artificial Sequence
  Description of Artificial Sequence: Synthetic oligonucleotide
uguccucucuguugccuuu

SEQ ID NO: 537 - RNA, 19 nt, Artificial Sequence
  Description of Artificial Sequence: Synthetic oligonucleotide
guccucucuguugccuuuu

SEQ ID NO: 538 - RNA, 19 nt, Artificial Sequence
  Description of Artificial Sequence: Synthetic oligonucleotide
aagauauuuauucuggguu

SEQ ID NO: 539 - RNA, 19 nt, Artificial Sequence
  Description of Artificial Sequence: Synthetic oligonucleotide
agauauuuauucuggguuu

SEQ ID NO: 540 - RNA, 19 nt, Artificial Sequence
  Description of Artificial Sequence: Synthetic oligonucleotide
gauauuuauucuggguuuu

SEQ ID NO: 541 - RNA, 19 nt, Artificial Sequence
  Description of Artificial Sequence: Synthetic oligonucleotide
cuggcaccuacgugguggu

SEQ ID NO: 542 - RNA, 19 nt, Artificial Sequence
  Description of Artificial Sequence: Synthetic oligonucleotide
cuacaggcagcaccagcga

SEQ ID NO: 543 - RNA, 19 nt, Artificial Sequence
  Description of Artificial Sequence: Synthetic oligonucleotide
cagguggaggugccaggaa

SEQ ID NO: 544 - RNA, 19 nt, Artificial Sequence
  Description of Artificial Sequence: Synthetic oligonucleotide
cucacuguggggcauuuca

SEQ ID NO: 545 - RNA, 19 nt, Artificial Sequence
  Description of Artificial Sequence: Synthetic oligonucleotide
cgugccugccaagcucaca

SEQ ID NO: 546 - RNA, 19 nt, Artificial Sequence
  Description of Artificial Sequence: Synthetic oligonucleotide
ccaagggaagggcacgguu

SEQ ID NO: 547 - RNA, 19 nt, Artificial Sequence
  Description of Artificial Sequence: Synthetic oligonucleotide
cucuagaccuguuuugcuu

SEQ ID NO: 548 - RNA, 19 nt, Artificial Sequence
  Description of Artificial Sequence: Synthetic oligonucleotide
cccuagaccuguuuugcuu

SEQ ID NO: 549 - RNA, 19 nt, Artificial Sequence
  Description of Artificial Sequence: Synthetic oligonucleotide
gguuggcagcuguuuugca

SEQ ID NO: 550 - RNA, 19 nt, Artificial Sequence
  Description of Artificial Sequence: Synthetic oligonucleotide
guuggcagcuguuuugcag

SEQ ID NO: 551 - RNA, 19 nt, Artificial Sequence
  Description of Artificial Sequence: Synthetic oligonucleotide
uggcagcuguuuugcagga

SEQ ID NO: 552 - RNA, 19 nt, Artificial Sequence
  Description of Artificial Sequence: Synthetic oligonucleotide
ggcagcuguuuugcaggac

SEQ ID NO: 553 - RNA, 19 nt, Artificial Sequence
  Description of Artificial Sequence: Synthetic oligonucleotide
gcagcuguuuugcaggacu

SEQ ID NO: 554 - RNA, 19 nt, Artificial Sequence
  Description of Artificial Sequence: Synthetic oligonucleotide
ccuacacggauggccacag

SEQ ID NO: 555 - RNA, 19 nt, Artificial Sequence
  Description of Artificial Sequence: Synthetic oligonucleotide
gaugaggagcugcugagcu

SEQ ID NO: 556 - RNA, 19 nt, Artificial Sequence
  Description of Artificial Sequence: Synthetic oligonucleotide
gcugcugagcugcuccagu

SEQ ID NO: 557 - RNA, 19 nt, Artificial Sequence
  Description of Artificial Sequence: Synthetic oligonucleotide
ugcugagcugcuccaguuu

SEQ ID NO: 558 - RNA, 19 nt, Artificial Sequence
  Description of Artificial Sequence: Synthetic oligonucleotide
gcugagcugcuccaguuuc

SEQ ID NO: 559 - RNA, 19 nt, Artificial Sequence
  Description of Artificial Sequence: Synthetic oligonucleotide
cugagcugcuccaguuucu

SEQ ID NO: 560 - RNA, 19 nt, Artificial Sequence
  Description of Artificial Sequence: Synthetic oligonucleotide
agcugcuccaguuucucca

SEQ ID NO: 561 - RNA, 19 nt, Artificial Sequence
  Description of Artificial Sequence: Synthetic oligonucleotide
gcugcuccaguuucuccag

SEQ ID NO: 562 - RNA, 19 nt, Artificial Sequence
  Description of Artificial Sequence: Synthetic oligonucleotide
ugcuccaguuucuccagga

SEQ ID NO: 563 - RNA, 19 nt, Artificial Sequence
  Description of Artificial Sequence: Synthetic oligonucleotide
cuccaguuucuccaggagu

SEQ ID NO: 564 - RNA, 19 nt, Artificial Sequence
  Description of Artificial Sequence: Synthetic oligonucleotide
aguuucuccaggaguggga

SEQ ID NO: 565 - RNA, 19 nt, Artificial Sequence
  Description of Artificial Sequence: Synthetic oligonucleotide
uuucuccaggagugggaag

SEQ ID NO: 566 - RNA, 19 nt, Artificial Sequence
  Description of Artificial Sequence: Synthetic oligonucleotide
ggugucuacgccauugcca

SEQ ID NO: 567 - RNA, 19 nt, Artificial Sequence
  Description of Artificial Sequence: Synthetic oligonucleotide
gugucuacgccauugccag

SEQ ID NO: 568 - RNA, 19 nt, Artificial Sequence
  Description of Artificial Sequence: Synthetic oligonucleotide
gucuacgccauugccaggu

SEQ ID NO: 569 - RNA, 19 nt, Artificial Sequence
  Description of Artificial Sequence: Synthetic oligonucleotide
ucuacgccauugccaggug

SEQ ID NO: 570 - RNA, 19 nt, Artificial Sequence
  Description of Artificial Sequence: Synthetic oligonucleotide
acgccauugccaggugcug

SEQ ID NO: 571 - RNA, 19 nt, Artificial Sequence
  Description of Artificial Sequence: Synthetic oligonucleotide
cauugccaggugcugccug

SEQ ID NO: 572 - RNA, 19 nt, Artificial Sequence
  Description of Artificial Sequence: Synthetic oligonucleotide
caacugcagcguccacaca

SEQ ID NO: 573 - RNA, 19 nt, Artificial Sequence
  Description of Artificial Sequence: Synthetic oligonucleotide
aacugcagcguccacacag

SEQ ID NO: 574 - RNA, 19 nt, Artificial Sequence
  Description of Artificial Sequence: Synthetic oligonucleotide
cugcagcguccacacagcu

SEQ ID NO: 575 - RNA, 19 nt, Artificial Sequence
  Description of Artificial Sequence: Synthetic oligonucleotide
ugcagcguccacacagcuc

SEQ ID NO: 576 - RNA, 19 nt, Artificial Sequence
  Description of Artificial Sequence: Synthetic oligonucleotide
cagcguccacacagcucca

SEQ ID NO: 577 - RNA, 19 nt, Artificial Sequence
  Description of Artificial Sequence: Synthetic oligonucleotide
agcguccacacagcuccac

SEQ ID NO: 578 - RNA, 19 nt, Artificial Sequence
  Description of Artificial Sequence: Synthetic oligonucleotide
cguccacacagcuccacca

SEQ ID NO: 579 - RNA, 19 nt, Artificial Sequence
  Description of Artificial Sequence: Synthetic oligonucleotide
guccacacagcuccaccag

SEQ ID NO: 580 - RNA, 19 nt, Artificial Sequence
  Description of Artificial Sequence: Synthetic oligonucleotide
ccacacagcuccaccagcu

SEQ ID NO: 581 - RNA, 19 nt, Artificial Sequence
  Description of Artificial Sequence: Synthetic oligonucleotide
cccaggucuggaaugcaaa

SEQ ID NO: 582 - RNA, 19 nt, Artificial Sequence
  Description of Artificial Sequence: Synthetic oligonucleotide
cagguuggcagcuguuuug

SEQ ID NO: 583 - RNA, 19 nt, Artificial Sequence
  Description of Artificial Sequence: Synthetic oligonucleotide
cagcuguuuugcaggacug

SEQ ID NO: 584 - RNA, 19 nt, Artificial Sequence
  Description of Artificial Sequence: Synthetic oligonucleotide
agcuguuuugcaggacugu

SEQ ID NO: 585 - RNA, 19 nt, Artificial Sequence
  Description of Artificial Sequence: Synthetic oligonucleotide
augaggagcugcugagcug

SEQ ID NO: 586 - RNA, 19 nt, Artificial Sequence
  Description of Artificial Sequence: Synthetic oligonucleotide
cugcugagcugcuccaguu

SEQ ID NO: 587 - RNA, 19 nt, Artificial Sequence
  Description of Artificial Sequence: Synthetic oligonucleotide
ugagcugcuccaguuucuc

SEQ ID NO: 588 - RNA, 19 nt, Artificial Sequence
  Description of Artificial Sequence: Synthetic oligonucleotide
gcuccaguuucuccaggag

SEQ ID NO: 589 - RNA, 19 nt, Artificial Sequence
  Description of Artificial Sequence: Synthetic oligonucleotide
uccaguuucuccaggagug

SEQ ID NO: 590 - RNA, 19 nt, Artificial Sequence
  Description of Artificial Sequence: Synthetic oligonucleotide
guuucuccaggagugggaa

SEQ ID NO: 591 - RNA, 19 nt, Artificial Sequence
  Description of Artificial Sequence: Synthetic oligonucleotide
cgggcccacaacgcuuuug

SEQ ID NO: 592 - RNA, 19 nt, Artificial Sequence
  Description of Artificial Sequence: Synthetic oligonucleotide
gugagggugucuacgccau

SEQ ID NO: 593 - RNA, 19 nt, Artificial Sequence
  Description of Artificial Sequence: Synthetic oligonucleotide
ugagggugucuacgccauu

SEQ ID NO: 594 - RNA, 19 nt, Artificial Sequence
  Description of Artificial Sequence: Synthetic oligonucleotide
uacgccauugccaggugcu

SEQ ID NO: 595 - RNA, 19 nt, Artificial Sequence
  Description of Artificial Sequence: Synthetic oligonucleotide
ccauugccaggugcugccu

SEQ ID NO: 596 - RNA, 19 nt, Artificial Sequence
  Description of Artificial Sequence: Synthetic oligonucleotide
uugccaggugcugccugcu

SEQ ID NO: 597 - RNA, 19 nt, Artificial Sequence
  Description of Artificial Sequence: Synthetic oligonucleotide
ugccaggugcugccugcua

SEQ ID NO: 598 - RNA, 19 nt, Artificial Sequence
  Description of Artificial Sequence: Synthetic oligonucleotide
uuuuauugagcucuuguuc

SEQ ID NO: 599 - RNA, 19 nt, Artificial Sequence
  Description of Artificial Sequence: Synthetic oligonucleotide
uucuagaccuguuuugcuu

SEQ ID NO: 600 - RNA, 19 nt, Artificial Sequence
  Description of Artificial Sequence: Synthetic oligonucleotide
uucuagaccuguuuugcuu

SEQ ID NO: 601 - RNA, 19 nt, Artificial Sequence
  Description of Artificial Sequence: Synthetic oligonucleotide
uucuagaccuguuuugcuu

SEQ ID NO: 602 - RNA, 19 nt, Artificial Sequence
  Description of Artificial Sequence: Synthetic oligonucleotide
uucuagaccuguuuugcuu

SEQ ID NO: 603 - RNA, 19 nt, Artificial Sequence
  Description of Artificial Sequence: Synthetic oligonucleotide
uucuagaccuguuuugcuu

SEQ ID NO: 604 - RNA, 19 nt, Artificial Sequence
  Description of Artificial Sequence: Synthetic oligonucleotide
uucuagaccuguuuugcuu

SEQ ID NO: 605 - RNA, 19 nt, Artificial Sequence
  Description of Artificial Sequence: Synthetic oligonucleotide
uucuagaccuguuuugcuu

SEQ ID NO: 606 - RNA, 19 nt, Artificial Sequence
  Description of Artificial Sequence: Synthetic oligonucleotide
  modified_base (10)..(10): 2,4-difluorotoluyl ribonucleotide-3`-phosphate
cucuagaccnguuuugcuu

SEQ ID NO: 607 - RNA, 19 nt, Artificial Sequence
  Description of Artificial Sequence: Synthetic oligonucleotide
uucuagaccuguuuugcua

SEQ ID NO: 608 - RNA, 19 nt, Artificial Sequence
  Description of Artificial Sequence: Synthetic oligonucleotide
uucuagaccaguuuugcua

SEQ ID NO: 609 - RNA, 19 nt, Artificial Sequence
  Description of Artificial Sequence: Synthetic oligonucleotide
  modified_base (10)..(10): 2,4-difluorotoluyl ribonucleotide-3`-phosphate
uucuagaccnguuuugcua

SEQ ID NO: 610 - RNA, 19 nt, Artificial Sequence
  Description of Artificial Sequence: Synthetic oligonucleotide
  modified_base (10)..(10): 2,4-difluorotoluyl ribonucleotide-3`-phosphate
gucuagaccnguuuugcua

SEQ ID NO: 611 - RNA, 19 nt, Artificial Sequence
  Description of Artificial Sequence: Synthetic oligonucleotide
gaguccuccucgauguagu

SEQ ID NO: 612 - RNA, 19 nt, Artificial Sequence
  Description of Artificial Sequence: Synthetic oligonucleotide
aggaguccuccucgaugua

SEQ ID NO: 613 - RNA, 19 nt, Artificial Sequence
  Description of Artificial Sequence: Synthetic oligonucleotide
gaggaguccuccucgaugu

SEQ ID NO: 614 - RNA, 19 nt, Artificial Sequence
  Description of Artificial Sequence: Synthetic oligonucleotide
agaggaguccuccucgaug

SEQ ID NO: 615 - RNA, 19 nt, Artificial Sequence
  Description of Artificial Sequence: Synthetic oligonucleotide
acagaggaguccuccucga

SEQ ID NO: 616 - RNA, 19 nt, Artificial Sequence
  Description of Artificial Sequence: Synthetic oligonucleotide
gacagaggaguccuccucg

SEQ ID NO: 617 - RNA, 19 nt, Artificial Sequence
  Description of Artificial Sequence: Synthetic oligonucleotide
agacagaggaguccuccuc

SEQ ID NO: 618 - RNA, 19 nt, Artificial Sequence
  Description of Artificial Sequence: Synthetic oligonucleotide
aagacagaggaguccuccu

SEQ ID NO: 619 - RNA, 19 nt, Artificial Sequence
  Description of Artificial Sequence: Synthetic oligonucleotide
uacaccuccaccaggcugc

SEQ ID NO: 620 - RNA, 19 nt, Artificial Sequence
  Description of Artificial Sequence: Synthetic oligonucleotide
auacaccuccaccaggcug

SEQ ID NO: 621 - RNA, 19 nt, Artificial Sequence
  Description of Artificial Sequence: Synthetic oligonucleotide
gauacaccuccaccaggcu

SEQ ID NO: 622 - RNA, 19 nt, Artificial Sequence
  Description of Artificial Sequence: Synthetic oligonucleotide
agauacaccuccaccaggc

SEQ ID NO: 623 - RNA, 19 nt, Artificial Sequence
  Description of Artificial Sequence: Synthetic oligonucleotide
cuaggagauacaccuccac

SEQ ID NO: 624 - RNA, 19 nt, Artificial Sequence
  Description of Artificial Sequence: Synthetic oligonucleotide
ucuaggagauacaccucca

SEQ ID NO: 625 - RNA, 19 nt, Artificial Sequence
  Description of Artificial Sequence: Synthetic oligonucleotide
ugucuaggagauacaccuc

SEQ ID NO: 626 - RNA, 19 nt, Artificial Sequence
  Description of Artificial Sequence: Synthetic oligonucleotide
uggugucuaggagauacac

SEQ ID NO: 627 - RNA, 19 nt, Artificial Sequence
  Description of Artificial Sequence: Synthetic oligonucleotide
ugcuggugucuaggagaua

SEQ ID NO: 628 - RNA, 19 nt, Artificial Sequence
  Description of Artificial Sequence: Synthetic oligonucleotide
augcuggugucuaggagau

SEQ ID NO: 629 - RNA, 19 nt, Artificial Sequence
  Description of Artificial Sequence: Synthetic oligonucleotide
ucuguaugcuggugucuag

SEQ ID NO: 630 - RNA, 19 nt, Artificial Sequence
  Description of Artificial Sequence: Synthetic oligonucleotide
cucuguaugcuggugucua

SEQ ID NO: 631 - RNA, 19 nt, Artificial Sequence
  Description of Artificial Sequence: Synthetic oligonucleotide
acucuguaugcuggugucu

SEQ ID NO: 632 - RNA, 19 nt, Artificial Sequence
  Description of Artificial Sequence: Synthetic oligonucleotide
ucacucuguaugcuggugu

SEQ ID NO: 633 - RNA, 19 nt, Artificial Sequence
  Description of Artificial Sequence: Synthetic oligonucleotide
gucacucuguaugcuggug

SEQ ID NO: 634 - RNA, 19 nt, Artificial Sequence
  Description of Artificial Sequence: Synthetic oligonucleotide
uggucacucuguaugcugg

SEQ ID NO: 635 - RNA, 19 nt, Artificial Sequence
  Description of Artificial Sequence: Synthetic oligonucleotide
guggucacucuguaugcug

SEQ ID NO: 636 - RNA, 19 nt, Artificial Sequence
  Description of Artificial Sequence: Synthetic oligonucleotide
ucccgguggucacucugua

SEQ ID NO: 637 - RNA, 19 nt, Artificial Sequence
  Description of Artificial Sequence: Synthetic oligonucleotide
uucccgguggucacucugu

SEQ ID NO: 638 - RNA, 19 nt, Artificial Sequence
  Description of Artificial Sequence: Synthetic oligonucleotide
uuucccgguggucacucug

SEQ ID NO: 639 - RNA, 19 nt, Artificial Sequence
  Description of Artificial Sequence: Synthetic oligonucleotide
cucgauuucccggugguca

SEQ ID NO: 640 - RNA, 19 nt, Artificial Sequence
  Description of Artificial Sequence: Synthetic oligonucleotide
ugcccucgauuucccggug

SEQ ID NO: 641 - RNA, 19 nt, Artificial Sequence
  Description of Artificial Sequence: Synthetic oligonucleotide
cugcccucgauuucccggu

SEQ ID NO: 642 - RNA, 19 nt, Artificial Sequence
  Description of Artificial Sequence: Synthetic oligonucleotide
acccugcccucgauuuccc

SEQ ID NO: 643 - RNA, 19 nt, Artificial Sequence
  Description of Artificial Sequence: Synthetic oligonucleotide
gacccugcccucgauuucc

SEQ ID NO: 644 - RNA, 19 nt, Artificial Sequence
  Description of Artificial Sequence: Synthetic oligonucleotide
ugacccugcccucgauuuc

SEQ ID NO: 645 - RNA, 19 nt, Artificial Sequence
  Description of Artificial Sequence: Synthetic oligonucleotide
caugacccugcccucgauu

SEQ ID NO: 646 - RNA, 19 nt, Artificial Sequence
  Description of Artificial Sequence: Synthetic oligonucleotide
accaugacccugcccucga

SEQ ID NO: 647 - RNA, 19 nt, Artificial Sequence
  Description of Artificial Sequence: Synthetic oligonucleotide
gugaccaugacccugcccu

SEQ ID NO: 648 - RNA, 19 nt, Artificial Sequence
  Description of Artificial Sequence: Synthetic oligonucleotide
ucggugaccaugacccugc

SEQ ID NO: 649 - RNA, 19 nt, Artificial Sequence
  Description of Artificial Sequence: Synthetic oligonucleotide
aagucggugaccaugaccc

SEQ ID NO: 650 - RNA, 19 nt, Artificial Sequence
  Description of Artificial Sequence: Synthetic oligonucleotide
gaagucggugaccaugacc

SEQ ID NO: 651 - RNA, 19 nt, Artificial Sequence
  Description of Artificial Sequence: Synthetic oligonucleotide
ucgaagucggugaccauga

SEQ ID NO: 652 - RNA, 19 nt, Artificial Sequence
  Description of Artificial Sequence: Synthetic oligonucleotide
cucgaagucggugaccaug

SEQ ID NO: 653 - RNA, 19 nt, Artificial Sequence
  Description of Artificial Sequence: Synthetic oligonucleotide
ugucuguggaagcgggucc

SEQ ID NO: 654 - RNA, 19 nt, Artificial Sequence
  Description of Artificial Sequence: Synthetic oligonucleotide
cugucuguggaagcggguc

SEQ ID NO: 655 - RNA, 19 nt, Artificial Sequence
  Description of Artificial Sequence: Synthetic oligonucleotide
uggccugucuguggaagcg

SEQ ID NO: 656 - RNA, 19 nt, Artificial Sequence
  Description of Artificial Sequence: Synthetic oligonucleotide
cuggccugucuguggaagc

SEQ ID NO: 657 - RNA, 19 nt, Artificial Sequence
  Description of Artificial Sequence: Synthetic oligonucleotide
ugcuggccugucuguggaa

SEQ ID NO: 658 - RNA, 19 nt, Artificial Sequence
  Description of Artificial Sequence: Synthetic oligonucleotide
uugcuggccugucugugga

SEQ ID NO: 659 - RNA, 19 nt, Artificial Sequence
  Description of Artificial Sequence: Synthetic oligonucleotide
cuugcuggccugucugugg

SEQ ID NO: 660 - RNA, 19 nt, Artificial Sequence
  Description of Artificial Sequence: Synthetic oligonucleotide
acuugcuggccugucugug

SEQ ID NO: 661 - RNA, 19 nt, Artificial Sequence
  Description of Artificial Sequence: Synthetic oligonucleotide
cacuugcuggccugucugu

SEQ ID NO: 662 - RNA, 19 nt, Artificial Sequence
  Description of Artificial Sequence: Synthetic oligonucleotide
acacuugcuggccugucug

SEQ ID NO: 663 - RNA, 19 nt, Artificial Sequence
  Description of Artificial Sequence: Synthetic oligonucleotide
cacacuugcuggccugucu

SEQ ID NO: 664 - RNA, 19 nt, Artificial Sequence
  Description of Artificial Sequence: Synthetic oligonucleotide
ucacacuugcuggccuguc

SEQ ID NO: 665 - RNA, 19 nt, Artificial Sequence
  Description of Artificial Sequence: Synthetic oligonucleotide
gucacacuugcuggccugu

SEQ ID NO: 666 - RNA, 19 nt, Artificial Sequence
  Description of Artificial Sequence: Synthetic oligonucleotide
ugucacacuugcuggccug

SEQ ID NO: 667 - RNA, 19 nt, Artificial Sequence
  Description of Artificial Sequence: Synthetic oligonucleotide
cugucacacuugcuggccu

SEQ ID NO: 668 - RNA, 19 nt, Artificial Sequence
  Description of Artificial Sequence: Synthetic oligonucleotide
aguugagcacgcgcaggcu

SEQ ID NO: 669 - RNA, 19 nt, Artificial Sequence
  Description of Artificial Sequence: Synthetic oligonucleotide
uuggcaguugagcacgcgc

SEQ ID NO: 670 - RNA, 19 nt, Artificial Sequence
  Description of Artificial Sequence: Synthetic oligonucleotide
ucccuuggcaguugagcac

SEQ ID NO: 671 - RNA, 19 nt, Artificial Sequence
  Description of Artificial Sequence: Synthetic oligonucleotide
uucccuuggcaguugagca

SEQ ID NO: 672 - RNA, 19 nt, Artificial Sequence
  Description of Artificial Sequence: Synthetic oligonucleotide
cuucccuuggcaguugagc

SEQ ID NO: 673 - RNA, 19 nt, Artificial Sequence
  Description of Artificial Sequence: Synthetic oligonucleotide
ugcccuucccuuggcaguu

SEQ ID NO: 674 - RNA, 19 nt, Artificial Sequence
  Description of Artificial Sequence: Synthetic oligonucleotide
gugcccuucccuuggcagu

SEQ ID NO: 675 - RNA, 19 nt, Artificial Sequence
  Description of Artificial Sequence: Synthetic oligonucleotide
cuccaggccuaugagggug

SEQ ID NO: 676 - RNA, 19 nt, Artificial Sequence
  Description of Artificial Sequence: Synthetic oligonucleotide
acuccaggccuaugagggu

SEQ ID NO: 677 - RNA, 19 nt, Artificial Sequence
  Description of Artificial Sequence: Synthetic oligonucleotide
aacuccaggccuaugaggg

SEQ ID NO: 678 - RNA, 19 nt, Artificial Sequence
  Description of Artificial Sequence: Synthetic oligonucleotide
aaacuccaggccuaugagg

SEQ ID NO: 679 - RNA, 19 nt, Artificial Sequence
  Description of Artificial Sequence: Synthetic oligonucleotide
uaaacuccaggccuaugag

SEQ ID NO: 680 - RNA, 19 nt, Artificial Sequence
  Description of Artificial Sequence: Synthetic oligonucleotide
uuuccgaauaaacuccagg

SEQ ID NO: 681 - RNA, 19 nt, Artificial Sequence
  Description of Artificial Sequence: Synthetic oligonucleotide
cuuuuccgaauaaacucca

SEQ ID NO: 682 - RNA, 19 nt, Artificial Sequence
  Description of Artificial Sequence: Synthetic oligonucleotide
uggcuuuuccgaauaaacu

SEQ ID NO: 683 - RNA, 19 nt, Artificial Sequence
  Description of Artificial Sequence: Synthetic oligonucleotide
cuggcuuuuccgaauaaac

SEQ ID NO: 684 - RNA, 19 nt, Artificial Sequence
  Description of Artificial Sequence: Synthetic oligonucleotide
cagcuggcuuuuccgaaua

SEQ ID NO: 685 - RNA, 19 nt, Artificial Sequence
  Description of Artificial Sequence: Synthetic oligonucleotide
accagcuggcuuuuccgaa

SEQ ID NO: 686 - RNA, 19 nt, Artificial Sequence
  Description of Artificial Sequence: Synthetic oligonucleotide
gaccagcuggcuuuuccga

SEQ ID NO: 687 - RNA, 19 nt, Artificial Sequence
  Description of Artificial Sequence: Synthetic oligonucleotide
uggaccagcuggcuuuucc

SEQ ID NO: 688 - RNA, 19 nt, Artificial Sequence
  Description of Artificial Sequence: Synthetic oligonucleotide
cuggaccagcuggcuuuuc

SEQ ID NO: 689 - RNA, 19 nt, Artificial Sequence
  Description of Artificial Sequence: Synthetic oligonucleotide
aaguugccggcagcgguga

SEQ ID NO: 690 - RNA, 19 nt, Artificial Sequence
  Description of Artificial Sequence: Synthetic oligonucleotide
aggcaucgucccggaaguu

SEQ ID NO: 691 - RNA, 19 nt, Artificial Sequence
  Description of Artificial Sequence: Synthetic oligonucleotide
caggcaucgucccggaagu

SEQ ID NO: 692 - RNA, 19 nt, Artificial Sequence
  Description of Artificial Sequence: Synthetic oligonucleotide
uagaggcaggcaucguccc

SEQ ID NO: 693 - RNA, 19 nt, Artificial Sequence
  Description of Artificial Sequence: Synthetic oligonucleotide
aguagaggcaggcaucguc

SEQ ID NO: 694 - RNA, 19 nt, Artificial Sequence
  Description of Artificial Sequence: Synthetic oligonucleotide
gaguagaggcaggcaucgu

SEQ ID NO: 695 - RNA, 19 nt, Artificial Sequence
  Description of Artificial Sequence: Synthetic oligonucleotide
caacugugaugaccucggg

SEQ ID NO: 696 - RNA, 19 nt, Artificial Sequence
  Description of Artificial Sequence: Synthetic oligonucleotide
uggccccaacugugaugac

SEQ ID NO: 697 - RNA, 19 nt, Artificial Sequence
  Description of Artificial Sequence: Synthetic oligonucleotide
guggccccaacugugauga

SEQ ID NO: 698 - RNA, 19 nt, Artificial Sequence
  Description of Artificial Sequence: Synthetic oligonucleotide
ugguggccccaacugugau

SEQ ID NO: 699 - RNA, 19 nt, Artificial Sequence
  Description of Artificial Sequence: Synthetic oligonucleotide
uugguggccccaacuguga

SEQ ID NO: 700 - RNA, 19 nt, Artificial Sequence
  Description of Artificial Sequence: Synthetic oligonucleotide
auugguggccccaacugug

SEQ ID NO: 701 - RNA, 19 nt, Artificial Sequence
  Description of Artificial Sequence: Synthetic oligonucleotide
cauugguggccccaacugu

SEQ ID NO: 702 - RNA, 19 nt, Artificial Sequence
  Description of Artificial Sequence: Synthetic oligonucleotide
ugggcauugguggccccaa

SEQ ID NO: 703 - RNA, 19 nt, Artificial Sequence
  Description of Artificial Sequence: Synthetic oligonucleotide
aaaguccccagggucaccg

SEQ ID NO: 704 - RNA, 19 nt, Artificial Sequence
  Description of Artificial Sequence: Synthetic oligonucleotide
caaaguccccagggucacc

SEQ ID NO: 705 - RNA, 19 nt, Artificial Sequence
  Description of Artificial Sequence: Synthetic oligonucleotide
aguugguccccaaaguccc

SEQ ID NO: 706 - RNA, 19 nt, Artificial Sequence
  Description of Artificial Sequence: Synthetic oligonucleotide
aaguugguccccaaagucc

SEQ ID NO: 707 - RNA, 19 nt, Artificial Sequence
  Description of Artificial Sequence: Synthetic oligonucleotide
aggugggucuccuccuuca

SEQ ID NO: 708 - RNA, 19 nt, Artificial Sequence
  Description of Artificial Sequence: Synthetic oligonucleotide
aggaagccaggaagaaggc

SEQ ID NO: 709 - RNA, 19 nt, Artificial Sequence
  Description of Artificial Sequence: Synthetic oligonucleotide
aaagacagaggaguccucc

SEQ ID NO: 710 - RNA, 19 nt, Artificial Sequence
  Description of Artificial Sequence: Synthetic oligonucleotide
uucucgaagucggugacca

SEQ ID NO: 711 - RNA, 19 nt, Artificial Sequence
  Description of Artificial Sequence: Synthetic oligonucleotide
acugucacacuugcuggcc

SEQ ID NO: 712 - RNA, 19 nt, Artificial Sequence
  Description of Artificial Sequence: Synthetic oligonucleotide
ugccaggugggugccauga

SEQ ID NO: 713 - RNA, 19 nt, Artificial Sequence
  Description of Artificial Sequence: Synthetic oligonucleotide
aggcuggaccagcuggcuu

SEQ ID NO: 714 - RNA, 19 nt, Artificial Sequence
  Description of Artificial Sequence: Synthetic oligonucleotide
ugugaugaccucgggagcu

SEQ ID NO: 715 - RNA, 19 nt, Artificial Sequence
  Description of Artificial Sequence: Synthetic oligonucleotide
uugggcauugguggcccca

SEQ ID NO: 716 - RNA, 19 nt, Artificial Sequence
  Description of Artificial Sequence: Synthetic oligonucleotide
agggucaccggcuggucuu

SEQ ID NO: 717 - RNA, 19 nt, Artificial Sequence
  Description of Artificial Sequence: Synthetic oligonucleotide
ugugacacaaagcaggugc

SEQ ID NO: 718 - RNA, 19 nt, Artificial Sequence
  Description of Artificial Sequence: Synthetic oligonucleotide
uacaguccugcaaaacagc

SEQ ID NO: 719 - RNA, 19 nt, Artificial Sequence
  Description of Artificial Sequence: Synthetic oligonucleotide
uguggccauccguguaggc

SEQ ID NO: 720 - RNA, 19 nt, Artificial Sequence
  Description of Artificial Sequence: Synthetic oligonucleotide
uguggacgcugcaguuggc

SEQ ID NO: 721 - RNA, 19 nt, Artificial Sequence
  Description of Artificial Sequence: Synthetic oligonucleotide
ucagcugguggagcugugu

SEQ ID NO: 722 - RNA, 19 nt, Artificial Sequence
  Description of Artificial Sequence: Synthetic oligonucleotide
ugugaggacguggcccugu

SEQ ID NO: 723 - RNA, 19 nt, Artificial Sequence
  Description of Artificial Sequence: Synthetic oligonucleotide
acgucccggcuccugacua

SEQ ID NO: 724 - RNA, 19 nt, Artificial Sequence
  Description of Artificial Sequence: Synthetic oligonucleotide
uucgcuggugcugccugua

SEQ ID NO: 725 - RNA, 19 nt, Artificial Sequence
  Description of Artificial Sequence: Synthetic oligonucleotide
agcagauggcaacggcugu

SEQ ID NO: 726 - RNA, 19 nt, Artificial Sequence
  Description of Artificial Sequence: Synthetic oligonucleotide
aagcucagccccagcccuu

SEQ ID NO: 727 - RNA, 19 nt, Artificial Sequence
  Description of Artificial Sequence: Synthetic oligonucleotide
aaagcucagccccagcccu

SEQ ID NO: 728 - RNA, 19 nt, Artificial Sequence
  Description of Artificial Sequence: Synthetic oligonucleotide
aggccauggagggcugaga

SEQ ID NO: 729 - RNA, 19 nt, Artificial Sequence
  Description of Artificial Sequence: Synthetic oligonucleotide
auugggagcagcuggcagc

SEQ ID NO: 730 - RNA, 19 nt, Artificial Sequence
  Description of Artificial Sequence: Synthetic oligonucleotide
ugccuccuugguggagacc

SEQ ID NO: 731 - RNA, 19 nt, Artificial Sequence
  Description of Artificial Sequence: Synthetic oligonucleotide
uccaugggaagaauccugc

SEQ ID NO: 732 - RNA, 19 nt, Artificial Sequence
  Description of Artificial Sequence: Synthetic oligonucleotide
agaugagggccaucagcac

SEQ ID NO: 733 - RNA, 19 nt, Artificial Sequence
  Description of Artificial Sequence: Synthetic oligonucleotide
uagcuggagaugagggcca

SEQ ID NO: 734 - RNA, 19 nt, Artificial Sequence
  Description of Artificial Sequence: Synthetic oligonucleotide
augccauccagaaagcuaa

SEQ ID NO: 735 - RNA, 19 nt, Artificial Sequence
  Description of Artificial Sequence: Synthetic oligonucleotide
acagccuggcauagagcag

SEQ ID NO: 736 - RNA, 19 nt, Artificial Sequence
  Description of Artificial Sequence: Synthetic oligonucleotide
agaggcuuggcuucagagc

SEQ ID NO: 737 - RNA, 19 nt, Artificial Sequence
  Description of Artificial Sequence: Synthetic oligonucleotide
augccugcaggcaucguuc

SEQ ID NO: 738 - RNA, 19 nt, Artificial Sequence
  Description of Artificial Sequence: Synthetic oligonucleotide
ucaaggagggacaguuguu

SEQ ID NO: 739 - RNA, 19 nt, Artificial Sequence
  Description of Artificial Sequence: Synthetic oligonucleotide
uuggcuguaaaaaggcaac

SEQ ID NO: 740 - RNA, 21 nt, Artificial Sequence
  Description of Artificial Sequence: Synthetic oligonucleotide
aagcaaaacaggucuagaauu

SEQ ID NO: 741 - RNA, 21 nt, Artificial Sequence
  Description of Artificial Sequence: Synthetic oligonucleotide
aagcaaaacaggucuagaauu

SEQ ID NO: 742 - RNA, 21 nt, Artificial Sequence
  Description of Artificial Sequence: Synthetic oligonucleotide
aagcaaaacaggucuagaauu

SEQ ID NO: 743 - RNA, 21 nt, Artificial Sequence
  Description of Artificial Sequence: Synthetic oligonucleotide
aagcaaaacaggucuagaauu

SEQ ID NO: 744 - RNA, 21 nt, Artificial Sequence
  Description of Artificial Sequence: Synthetic oligonucleotide
aagcaaaacaggucuagaauu

SEQ ID NO: 745 - RNA, 21 nt, Artificial Sequence
  Description of Artificial Sequence: Synthetic oligonucleotide
aagcaaaacaggucuagaauu

SEQ ID NO: 746 - RNA, 21 nt, Artificial Sequence
  Description of Artificial Sequence: Synthetic oligonucleotide
aagcaaaacaggucuagaauu

SEQ ID NO: 747 - RNA, 19 nt, Artificial Sequence
  Description of Artificial Sequence: Synthetic oligonucleotide
aagcaaaacaggucuagaa

SEQ ID NO: 748 - RNA, 19 nt, Artificial Sequence
  Description of Artificial Sequence: Synthetic oligonucleotide
aggacugugcaggagcuga

SEQ ID NO: 749 - RNA, 19 nt, Artificial Sequence
  Description of Artificial Sequence: Synthetic oligonucleotide
aaccgugcccuucccuugg

SEQ ID NO: 750 - RNA, 19 nt, Artificial Sequence
  Description of Artificial Sequence: Synthetic oligonucleotide
accaccacguaggugccag

SEQ ID NO: 751 - RNA, 19 nt, Artificial Sequence
  Description of Artificial Sequence: Synthetic oligonucleotide
aagcaaaacaggucuagga

SEQ ID NO: 752 - DNA, 20 bp, Artificial Sequence
  Description of Artificial Sequence: Synthetic oligonucleotide
  Description of Combined DNA/RNA Molecule: Synthetic oligonucleotide
aagcaaaacaggucuagaat

SEQ ID NO: 753 - RNA, 19 nt, Artificial Sequence
  Description of Artificial Sequence: Synthetic oligonucleotide
aagcaaaacaggucuagaa

SEQ ID NO: 754 - RNA, 18 nt, Artificial Sequence
  Description of Artificial Sequence: Synthetic oligonucleotide
aagcaaaacaggucuaga

SEQ ID NO: 755 - RNA, 17 nt, Artificial Sequence
  Description of Artificial Sequence: Synthetic oligonucleotide
aagcaaaacaggucuag

SEQ ID NO: 756 - RNA, 16 nt, Artificial Sequence
  Description of Artificial Sequence: Synthetic oligonucleotide
aagcaaaacaggucua

SEQ ID NO: 757 - RNA, 15 nt, Artificial Sequence
  Description of Artificial Sequence: Synthetic oligonucleotide
aagcaaaacaggucu

SEQ ID NO: 758 - DNA, 20 bp, Artificial Sequence
  Description of Artificial Sequence: Synthetic oligonucleotide
  Description of Combined DNA/RNA Molecule: Synthetic oligonucleotide
agcaaaacaggucuagaatt

SEQ ID NO: 759 - DNA, 19 bp, Artificial Sequence
  Description of Artificial Sequence: Synthetic oligonucleotide
  Description of Combined DNA/RNA Molecule: Synthetic oligonucleotide
gcaaaacaggucuagaatt

SEQ ID NO: 760 - DNA, 18 bp, Artificial Sequence
  Description of Artificial Sequence: Synthetic oligonucleotide
  Description of Combined DNA/RNA Molecule: Synthetic oligonucleotide
caaaacaggucuagaatt

SEQ ID NO: 761 - DNA, 17 bp, Artificial Sequence
  Description of Artificial Sequence: Synthetic oligonucleotide
  Description of Combined DNA/RNA Molecule: Synthetic oligonucleotide
aaaacaggucuagaatt

SEQ ID NO: 762 - DNA, 16 bp, Artificial Sequence
  Description of Artificial Sequence: Synthetic oligonucleotide
  Description of Combined DNA/RNA Molecule: Synthetic oligonucleotide
aaacaggucuagaatt

SEQ ID NO: 763 - DNA, 15 bp, Artificial Sequence
  Description of Artificial Sequence: Synthetic oligonucleotide
  Description of Combined DNA/RNA Molecule: Synthetic oligonucleotide
aacaggucuagaatt

SEQ ID NO: 764 - RNA, 19 nt, Artificial Sequence
  Description of Artificial Sequence: Synthetic oligonucleotide
aaaguugguccccaaaguc

SEQ ID NO: 765 - RNA, 19 nt, Artificial Sequence
  Description of Artificial Sequence: Synthetic oligonucleotide
caaaguugguccccaaagu

SEQ ID NO: 766 - RNA, 19 nt, Artificial Sequence
  Description of Artificial Sequence: Synthetic oligonucleotide
agcggccaaaguugguccc

SEQ ID NO: 767 - RNA, 19 nt, Artificial Sequence
  Description of Artificial Sequence: Synthetic oligonucleotide
cagcggccaaaguuggucc

SEQ ID NO: 768 - RNA, 19 nt, Artificial Sequence
  Description of Artificial Sequence: Synthetic oligonucleotide
acagcggccaaaguugguc

SEQ ID NO: 769 - RNA, 19 nt, Artificial Sequence
  Description of Artificial Sequence: Synthetic oligonucleotide
acacagcggccaaaguugg

SEQ ID NO: 770 - RNA, 19 nt, Artificial Sequence
  Description of Artificial Sequence: Synthetic oligonucleotide
uccacacagcggccaaagu

SEQ ID NO: 771 - RNA, 19 nt, Artificial Sequence
  Description of Artificial Sequence: Synthetic oligonucleotide
guccacacagcggccaaag

SEQ ID NO: 772 - RNA, 19 nt, Artificial Sequence
  Description of Artificial Sequence: Synthetic oligonucleotide
agguccacacagcggccaa

SEQ ID NO: 773 - RNA, 19 nt, Artificial Sequence
  Description of Artificial Sequence: Synthetic oligonucleotide
aagagguccacacagcggc

SEQ ID NO: 774 - RNA, 19 nt, Artificial Sequence
  Description of Artificial Sequence: Synthetic oligonucleotide
aaagagguccacacagcgg

SEQ ID NO: 775 - RNA, 19 nt, Artificial Sequence
  Description of Artificial Sequence: Synthetic oligonucleotide
uggggcaaagagguccaca

SEQ ID NO: 776 - RNA, 19 nt, Artificial Sequence
  Description of Artificial Sequence: Synthetic oligonucleotide
cuggggcaaagagguccac

SEQ ID NO: 777 - RNA, 19 nt, Artificial Sequence
  Description of Artificial Sequence: Synthetic oligonucleotide
aaugauguccuccccuggg

SEQ ID NO: 778 - RNA, 19 nt, Artificial Sequence
  Description of Artificial Sequence: Synthetic oligonucleotide
caaugauguccuccccugg

SEQ ID NO: 779 - RNA, 19 nt, Artificial Sequence
  Description of Artificial Sequence: Synthetic oligonucleotide
accaaugauguccuccccu

SEQ ID NO: 780 - RNA, 19 nt, Artificial Sequence
  Description of Artificial Sequence: Synthetic oligonucleotide
caccaaugauguccucccc

SEQ ID NO: 781 - RNA, 19 nt, Artificial Sequence
  Description of Artificial Sequence: Synthetic oligonucleotide
aggcaccaaugauguccuc

SEQ ID NO: 782 - RNA, 19 nt, Artificial Sequence
  Description of Artificial Sequence: Synthetic oligonucleotide
gaggcaccaaugauguccu

SEQ ID NO: 783 - RNA, 19 nt, Artificial Sequence
  Description of Artificial Sequence: Synthetic oligonucleotide
cuggaggcaccaaugaugu

SEQ ID NO: 784 - RNA, 19 nt, Artificial Sequence
  Description of Artificial Sequence: Synthetic oligonucleotide
gucgcuggaggcaccaaug

SEQ ID NO: 785 - RNA, 19 nt, Artificial Sequence
  Description of Artificial Sequence: Synthetic oligonucleotide
agucgcuggaggcaccaau

SEQ ID NO: 786 - RNA, 19 nt, Artificial Sequence
  Description of Artificial Sequence: Synthetic oligonucleotide
cagucgcuggaggcaccaa

SEQ ID NO: 787 - RNA, 19 nt, Artificial Sequence
  Description of Artificial Sequence: Synthetic oligonucleotide
aggugcugcagucgcugga

SEQ ID NO: 788 - RNA, 19 nt, Artificial Sequence
  Description of Artificial Sequence: Synthetic oligonucleotide
agcaggugcugcagucgcu

SEQ ID NO: 789 - RNA, 19 nt, Artificial Sequence
  Description of Artificial Sequence: Synthetic oligonucleotide
aagcaggugcugcagucgc

SEQ ID NO: 790 - RNA, 19 nt, Artificial Sequence
  Description of Artificial Sequence: Synthetic oligonucleotide
aaagcaggugcugcagucg

SEQ ID NO: 791 - RNA, 19 nt, Artificial Sequence
  Description of Artificial Sequence: Synthetic oligonucleotide
caaagcaggugcugcaguc

SEQ ID NO: 792 - RNA, 19 nt, Artificial Sequence
  Description of Artificial Sequence: Synthetic oligonucleotide
acaaagcaggugcugcagu

SEQ ID NO: 793 - RNA, 19 nt, Artificial Sequence
  Description of Artificial Sequence: Synthetic oligonucleotide
cacaaagcaggugcugcag

SEQ ID NO: 794 - RNA, 19 nt, Artificial Sequence
  Description of Artificial Sequence: Synthetic oligonucleotide
acacaaagcaggugcugca

SEQ ID NO: 795 - RNA, 19 nt, Artificial Sequence
  Description of Artificial Sequence: Synthetic oligonucleotide
gacacaaagcaggugcugc

SEQ ID NO: 796 - RNA, 19 nt, Artificial Sequence
  Description of Artificial Sequence: Synthetic oligonucleotide
ugacacaaagcaggugcug

SEQ ID NO: 797 - RNA, 19 nt, Artificial Sequence
  Description of Artificial Sequence: Synthetic oligonucleotide
aaugccagccacgugggca

SEQ ID NO: 798 - RNA, 19 nt, Artificial Sequence
  Description of Artificial Sequence: Synthetic oligonucleotide
ugcaaugccagccacgugg

SEQ ID NO: 799 - RNA, 19 nt, Artificial Sequence
  Description of Artificial Sequence: Synthetic oligonucleotide
cugcaaugccagccacgug

SEQ ID NO: 800 - RNA, 19 nt, Artificial Sequence
  Description of Artificial Sequence: Synthetic oligonucleotide
uggcugcaaugccagccac

SEQ ID NO: 801 - RNA, 19 nt, Artificial Sequence
  Description of Artificial Sequence: Synthetic oligonucleotide
auggcugcaaugccagcca

SEQ ID NO: 802 - RNA, 19 nt, Artificial Sequence
  Description of Artificial Sequence: Synthetic oligonucleotide
cauggcugcaaugccagcc

SEQ ID NO: 803 - RNA, 19 nt, Artificial Sequence
  Description of Artificial Sequence: Synthetic oligonucleotide
ucauggcugcaaugccagc

SEQ ID NO: 804 - RNA, 19 nt, Artificial Sequence
  Description of Artificial Sequence: Synthetic oligonucleotide
aucauggcugcaaugccag

SEQ ID NO: 805 - RNA, 19 nt, Artificial Sequence
  Description of Artificial Sequence: Synthetic oligonucleotide
caucauggcugcaaugcca

SEQ ID NO: 806 - RNA, 19 nt, Artificial Sequence
  Description of Artificial Sequence: Synthetic oligonucleotide
agcaucauggcugcaaugc

SEQ ID NO: 807 - RNA, 19 nt, Artificial Sequence
  Description of Artificial Sequence: Synthetic oligonucleotide
cagcaucauggcugcaaug

SEQ ID NO: 808 - RNA, 19 nt, Artificial Sequence
  Description of Artificial Sequence: Synthetic oligonucleotide
acagcaucauggcugcaau

SEQ ID NO: 809 - RNA, 19 nt, Artificial Sequence
  Description of Artificial Sequence: Synthetic oligonucleotide
gacagcaucauggcugcaa

SEQ ID NO: 810 - RNA, 19 nt, Artificial Sequence
  Description of Artificial Sequence: Synthetic oligonucleotide
agacagcaucauggcugca

SEQ ID NO: 811 - RNA, 19 nt, Artificial Sequence
  Description of Artificial Sequence: Synthetic oligonucleotide
cagacagcaucauggcugc

SEQ ID NO: 812 - RNA, 19 nt, Artificial Sequence
  Description of Artificial Sequence: Synthetic oligonucleotide
ucggcagacagcaucaugg

SEQ ID NO: 813 - RNA, 19 nt, Artificial Sequence
  Description of Artificial Sequence: Synthetic oligonucleotide
cucggcagacagcaucaug

SEQ ID NO: 814 - RNA, 19 nt, Artificial Sequence
  Description of Artificial Sequence: Synthetic oligonucleotide
ucugccucaacucggccag

SEQ ID NO: 815 - RNA, 19 nt, Artificial Sequence
  Description of Artificial Sequence: Synthetic oligonucleotide
cucugccucaacucggcca

SEQ ID NO: 816 - RNA, 19 nt, Artificial Sequence
  Description of Artificial Sequence: Synthetic oligonucleotide
ucucugccucaacucggcc

SEQ ID NO: 817 - RNA, 19 nt, Artificial Sequence
  Description of Artificial Sequence: Synthetic oligonucleotide
gucucugccucaacucggc

SEQ ID NO: 818 - RNA, 19 nt, Artificial Sequence
  Description of Artificial Sequence: Synthetic oligonucleotide
agucucugccucaacucgg

SEQ ID NO: 819 - RNA, 19 nt, Artificial Sequence
  Description of Artificial Sequence: Synthetic oligonucleotide
cagucucugccucaacucg

SEQ ID NO: 820 - RNA, 19 nt, Artificial Sequence
  Description of Artificial Sequence: Synthetic oligonucleotide
ucagucucugccucaacuc

SEQ ID NO: 821 - RNA, 19 nt, Artificial Sequence
  Description of Artificial Sequence: Synthetic oligonucleotide
aucagucucugccucaacu

SEQ ID NO: 822 - RNA, 19 nt, Artificial Sequence
  Description of Artificial Sequence: Synthetic oligonucleotide
uggaucagucucugccuca

SEQ ID NO: 823 - RNA, 19 nt, Artificial Sequence
  Description of Artificial Sequence: Synthetic oligonucleotide
guggaucagucucugccuc

SEQ ID NO: 824 - RNA, 19 nt, Artificial Sequence
  Description of Artificial Sequence: Synthetic oligonucleotide
aguggaucagucucugccu

SEQ ID NO: 825 - RNA, 19 nt, Artificial Sequence
  Description of Artificial Sequence: Synthetic oligonucleotide
aaguggaucagucucugcc

SEQ ID NO: 826 - RNA, 19 nt, Artificial Sequence
  Description of Artificial Sequence: Synthetic oligonucleotide
agaaguggaucagucucug

SEQ ID NO: 827 - RNA, 19 nt, Artificial Sequence
  Description of Artificial Sequence: Synthetic oligonucleotide
agagaaguggaucagucuc

SEQ ID NO: 828 - RNA, 19 nt, Artificial Sequence
  Description of Artificial Sequence: Synthetic oligonucleotide
cagagaaguggaucagucu

SEQ ID NO: 829 - RNA, 19 nt, Artificial Sequence
  Description of Artificial Sequence: Synthetic oligonucleotide
uggcagagaaguggaucag

SEQ ID NO: 830 - RNA, 19 nt, Artificial Sequence
  Description of Artificial Sequence: Synthetic oligonucleotide
uuggcagagaaguggauca

SEQ ID NO: 831 - RNA, 19 nt, Artificial Sequence
  Description of Artificial Sequence: Synthetic oligonucleotide
uuuggcagagaaguggauc

SEQ ID NO: 832 - RNA, 19 nt, Artificial Sequence
  Description of Artificial Sequence: Synthetic oligonucleotide
cuuuggcagagaaguggau

SEQ ID NO: 833 - RNA, 19 nt, Artificial Sequence
  Description of Artificial Sequence: Synthetic oligonucleotide
ucuuuggcagagaagugga

SEQ ID NO: 834 - RNA, 19 nt, Artificial Sequence
  Description of Artificial Sequence: Synthetic oligonucleotide
aucuuuggcagagaagugg

SEQ ID NO: 835 - RNA, 19 nt, Artificial Sequence
  Description of Artificial Sequence: Synthetic oligonucleotide
caucuuuggcagagaagug

SEQ ID NO: 836 - RNA, 19 nt, Artificial Sequence
  Description of Artificial Sequence: Synthetic oligonucleotide
acaucuuuggcagagaagu

SEQ ID NO: 837 - RNA, 19 nt, Artificial Sequence
  Description of Artificial Sequence: Synthetic oligonucleotide
gacaucuuuggcagagaag

SEQ ID NO: 838 - RNA, 19 nt, Artificial Sequence
  Description of Artificial Sequence: Synthetic oligonucleotide
augacaucuuuggcagaga

SEQ ID NO: 839 - RNA, 19 nt, Artificial Sequence
  Description of Artificial Sequence: Synthetic oligonucleotide
ugaugacaucuuuggcaga

SEQ ID NO: 840 - RNA, 19 nt, Artificial Sequence
  Description of Artificial Sequence: Synthetic oligonucleotide
uugaugacaucuuuggcag

SEQ ID NO: 841 - RNA, 19 nt, Artificial Sequence
  Description of Artificial Sequence: Synthetic oligonucleotide
auugaugacaucuuuggca

SEQ ID NO: 842 - RNA, 19 nt, Artificial Sequence
  Description of Artificial Sequence: Synthetic oligonucleotide
cauugaugacaucuuuggc

SEQ ID NO: 843 - RNA, 19 nt, Artificial Sequence
  Description of Artificial Sequence: Synthetic oligonucleotide
ucauugaugacaucuuugg

SEQ ID NO: 844 - RNA, 19 nt, Artificial Sequence
  Description of Artificial Sequence: Synthetic oligonucleotide
cucauugaugacaucuuug

SEQ ID NO: 845 - RNA, 19 nt, Artificial Sequence
  Description of Artificial Sequence: Synthetic oligonucleotide
aggccucauugaugacauc

SEQ ID NO: 846 - RNA, 19 nt, Artificial Sequence
  Description of Artificial Sequence: Synthetic oligonucleotide
caggccucauugaugacau

SEQ ID NO: 847 - RNA, 19 nt, Artificial Sequence
  Description of Artificial Sequence: Synthetic oligonucleotide
accaggccucauugaugac

SEQ ID NO: 848 - RNA, 19 nt, Artificial Sequence
  Description of Artificial Sequence: Synthetic oligonucleotide
aaccaggccucauugauga

SEQ ID NO: 849 - RNA, 19 nt, Artificial Sequence
  Description of Artificial Sequence: Synthetic oligonucleotide
gaaccaggccucauugaug

SEQ ID NO: 850 - RNA, 19 nt, Artificial Sequence
  Description of Artificial Sequence: Synthetic oligonucleotide
agggaaccaggccucauug

SEQ ID NO: 851 - RNA, 19 nt, Artificial Sequence
  Description of Artificial Sequence: Synthetic oligonucleotide
cagggaaccaggccucauu

SEQ ID NO: 852 - RNA, 19 nt, Artificial Sequence
  Description of Artificial Sequence: Synthetic oligonucleotide
ucagggaaccaggccucau

SEQ ID NO: 853 - RNA, 19 nt, Artificial Sequence
  Description of Artificial Sequence: Synthetic oligonucleotide
cucagggaaccaggccuca

SEQ ID NO: 854 - RNA, 19 nt, Artificial Sequence
  Description of Artificial Sequence: Synthetic oligonucleotide
uccucagggaaccaggccu

SEQ ID NO: 855 - RNA, 19 nt, Artificial Sequence
  Description of Artificial Sequence: Synthetic oligonucleotide
ucaguacccgcugguccuc

SEQ ID NO: 856 - RNA, 19 nt, Artificial Sequence
  Description of Artificial Sequence: Synthetic oligonucleotide
gucaguacccgcugguccu

SEQ ID NO: 857 - RNA, 19 nt, Artificial Sequence
  Description of Artificial Sequence: Synthetic oligonucleotide
aacagcugccaaccugccc

SEQ ID NO: 858 - RNA, 19 nt, Artificial Sequence
  Description of Artificial Sequence: Synthetic oligonucleotide
aaacagcugccaaccugcc

SEQ ID NO: 859 - RNA, 19 nt, Artificial Sequence
  Description of Artificial Sequence: Synthetic oligonucleotide
aaaacagcugccaaccugc

SEQ ID NO: 860 - RNA, 19 nt, Artificial Sequence
  Description of Artificial Sequence: Synthetic oligonucleotide
uggcucacuccuccaggcu

SEQ ID NO: 861 - RNA, 19 nt, Artificial Sequence
  Description of Artificial Sequence: Synthetic oligonucleotide
ugccuggcucacuccucca

SEQ ID NO: 862 - RNA, 19 nt, Artificial Sequence
  Description of Artificial Sequence: Synthetic oligonucleotide
acugccuggcucacuccuc

SEQ ID NO: 863 - RNA, 19 nt, Artificial Sequence
  Description of Artificial Sequence: Synthetic oligonucleotide
cacugccuggcucacuccu

SEQ ID NO: 864 - RNA, 19 nt, Artificial Sequence
  Description of Artificial Sequence: Synthetic oligonucleotide
ucacugccuggcucacucc

SEQ ID NO: 865 - RNA, 19 nt, Artificial Sequence
  Description of Artificial Sequence: Synthetic oligonucleotide
cucacugccuggcucacuc

SEQ ID NO: 866 - RNA, 19 nt, Artificial Sequence
  Description of Artificial Sequence: Synthetic oligonucleotide
ucucacugccuggcucacu

SEQ ID NO: 867 - RNA, 19 nt, Artificial Sequence
  Description of Artificial Sequence: Synthetic oligonucleotide
gucucacugccuggcucac

SEQ ID NO: 868 - RNA, 19 nt, Artificial Sequence
  Description of Artificial Sequence: Synthetic oligonucleotide
agucucacugccuggcuca

SEQ ID NO: 869 - RNA, 19 nt, Artificial Sequence
  Description of Artificial Sequence: Synthetic oligonucleotide
cagucucacugccuggcuc

SEQ ID NO: 870 - RNA, 19 nt, Artificial Sequence
  Description of Artificial Sequence: Synthetic oligonucleotide
aauccuggcugggagcugg

SEQ ID NO: 871 - RNA, 19 nt, Artificial Sequence
  Description of Artificial Sequence: Synthetic oligonucleotide
gaauccuggcugggagcug

SEQ ID NO: 872 - RNA, 19 nt, Artificial Sequence
  Description of Artificial Sequence: Synthetic oligonucleotide
gaggacugugcaggagcug

SEQ ID NO: 873 - RNA, 19 nt, Artificial Sequence
  Description of Artificial Sequence: Synthetic oligonucleotide
uggggaggacugugcagga

SEQ ID NO: 874 - RNA, 19 nt, Artificial Sequence
  Description of Artificial Sequence: Synthetic oligonucleotide
aggagaccuagaggccgug

SEQ ID NO: 875 - RNA, 19 nt, Artificial Sequence
  Description of Artificial Sequence: Synthetic oligonucleotide
gaggagaccuagaggccgu

SEQ ID NO: 876 - RNA, 19 nt, Artificial Sequence
  Description of Artificial Sequence: Synthetic oligonucleotide
uagucgccguccucguccu

SEQ ID NO: 877 - RNA, 19 nt, Artificial Sequence
  Description of Artificial Sequence: Synthetic oligonucleotide
ucguagucgccguccucgu

SEQ ID NO: 878 - RNA, 19 nt, Artificial Sequence
  Description of Artificial Sequence: Synthetic oligonucleotide
uccucguagucgccguccu

SEQ ID NO: 879 - RNA, 19 nt, Artificial Sequence
  Description of Artificial Sequence: Synthetic oligonucleotide
agcuccucguagucgccgu

SEQ ID NO: 880 - RNA, 19 nt, Artificial Sequence
  Description of Artificial Sequence: Synthetic oligonucleotide
accagcuccucguagucgc

SEQ ID NO: 881 - RNA, 19 nt, Artificial Sequence
  Description of Artificial Sequence: Synthetic oligonucleotide
caccagcuccucguagucg

SEQ ID NO: 882 - RNA, 19 nt, Artificial Sequence
  Description of Artificial Sequence: Synthetic oligonucleotide
agcaccagcuccucguagu

SEQ ID NO: 883 - RNA, 19 nt, Artificial Sequence
  Description of Artificial Sequence: Synthetic oligonucleotide
uagcaccagcuccucguag

SEQ ID NO: 884 - RNA, 19 nt, Artificial Sequence
  Description of Artificial Sequence: Synthetic oligonucleotide
cuagcaccagcuccucgua

SEQ ID NO: 885 - RNA, 19 nt, Artificial Sequence
  Description of Artificial Sequence: Synthetic oligonucleotide
aggcuagcaccagcuccuc

SEQ ID NO: 886 - RNA, 19 nt, Artificial Sequence
  Description of Artificial Sequence: Synthetic oligonucleotide
aaggcuagcaccagcuccu

SEQ ID NO: 887 - RNA, 19 nt, Artificial Sequence
  Description of Artificial Sequence: Synthetic oligonucleotide
gaacgcaaggcuagcacca

SEQ ID NO: 888 - RNA, 19 nt, Artificial Sequence
  Description of Artificial Sequence: Synthetic oligonucleotide
cucggaacgcaaggcuagc

SEQ ID NO: 889 - RNA, 19 nt, Artificial Sequence
  Description of Artificial Sequence: Synthetic oligonucleotide
cuccucggaacgcaaggcu

SEQ ID NO: 890 - RNA, 19 nt, Artificial Sequence
  Description of Artificial Sequence: Synthetic oligonucleotide
uccuccucggaacgcaagg

SEQ ID NO: 891 - RNA, 19 nt, Artificial Sequence
  Description of Artificial Sequence: Synthetic oligonucleotide
guccuccucggaacgcaag

SEQ ID NO: 892 - RNA, 19 nt, Artificial Sequence
  Description of Artificial Sequence: Synthetic oligonucleotide
agcgguggaagguggcugu

SEQ ID NO: 893 - RNA, 19 nt, Artificial Sequence
  Description of Artificial Sequence: Synthetic oligonucleotide
uccacggauccuuggcgca

SEQ ID NO: 894 - RNA, 19 nt, Artificial Sequence
  Description of Artificial Sequence: Synthetic oligonucleotide
agcaccaccacguaggugc

SEQ ID NO: 895 - RNA, 19 nt, Artificial Sequence
  Description of Artificial Sequence: Synthetic oligonucleotide
cagcaccaccacguaggug

SEQ ID NO: 896 - RNA, 19 nt, Artificial Sequence
  Description of Artificial Sequence: Synthetic oligonucleotide
ucagcaccaccacguaggu

SEQ ID NO: 897 - RNA, 19 nt, Artificial Sequence
  Description of Artificial Sequence: Synthetic oligonucleotide
uucagcaccaccacguagg

SEQ ID NO: 898 - RNA, 19 nt, Artificial Sequence
  Description of Artificial Sequence: Synthetic oligonucleotide
cuucagcaccaccacguag

SEQ ID NO: 899 - RNA, 19 nt, Artificial Sequence
  Description of Artificial Sequence: Synthetic oligonucleotide
uccuucagcaccaccacgu

SEQ ID NO: 900 - RNA, 19 nt, Artificial Sequence
  Description of Artificial Sequence: Synthetic oligonucleotide
cuccuucagcaccaccacg

SEQ ID NO: 901 - RNA, 19 nt, Artificial Sequence
  Description of Artificial Sequence: Synthetic oligonucleotide
uccuccuucagcaccacca

SEQ ID NO: 902 - RNA, 19 nt, Artificial Sequence
  Description of Artificial Sequence: Synthetic oligonucleotide
cuccuccuucagcaccacc

SEQ ID NO: 903 - RNA, 19 nt, Artificial Sequence
  Description of Artificial Sequence: Synthetic oligonucleotide
ucuccuccuucagcaccac

SEQ ID NO: 904 - RNA, 19 nt, Artificial Sequence
  Description of Artificial Sequence: Synthetic oligonucleotide
gucuccuccuucagcacca

SEQ ID NO: 905 - RNA, 19 nt, Artificial Sequence
  Description of Artificial Sequence: Synthetic oligonucleotide
ugggucuccuccuucagca

SEQ ID NO: 906 - RNA, 19 nt, Artificial Sequence
  Description of Artificial Sequence: Synthetic oligonucleotide
gugggucuccuccuucagc

SEQ ID NO: 907 - RNA, 19 nt, Artificial Sequence
  Description of Artificial Sequence: Synthetic oligonucleotide
cagugcgcucugacugcga

SEQ ID NO: 908 - RNA, 19 nt, Artificial Sequence
  Description of Artificial Sequence: Synthetic oligonucleotide
uuggugagguauccccggc

SEQ ID NO: 909 - RNA, 19 nt, Artificial Sequence
  Description of Artificial Sequence: Synthetic oligonucleotide
cuuggugagguauccccgg

SEQ ID NO: 910 - RNA, 19 nt, Artificial Sequence
  Description of Artificial Sequence: Synthetic oligonucleotide
ucuuggugagguauccccg

SEQ ID NO: 911 - RNA, 19 nt, Artificial Sequence
  Description of Artificial Sequence: Synthetic oligonucleotide
aucuuggugagguaucccc

SEQ ID NO: 912 - RNA, 19 nt, Artificial Sequence
  Description of Artificial Sequence: Synthetic oligonucleotide
aggaucuuggugagguauc

SEQ ID NO: 913 - RNA, 19 nt, Artificial Sequence
  Description of Artificial Sequence: Synthetic oligonucleotide
caggaucuuggugagguau

SEQ ID NO: 914 - RNA, 19 nt, Artificial Sequence
  Description of Artificial Sequence: Synthetic oligonucleotide
ugcaggaucuuggugaggu

SEQ ID NO: 915 - RNA, 19 nt, Artificial Sequence
  Description of Artificial Sequence: Synthetic oligonucleotide
augcaggaucuuggugagg

SEQ ID NO: 916 - RNA, 19 nt, Artificial Sequence
  Description of Artificial Sequence: Synthetic oligonucleotide
caugcaggaucuuggugag

SEQ ID NO: 917 - RNA, 19 nt, Artificial Sequence
  Description of Artificial Sequence: Synthetic oligonucleotide
acaugcaggaucuugguga

SEQ ID NO: 918 - RNA, 19 nt, Artificial Sequence
  Description of Artificial Sequence: Synthetic oligonucleotide
gacaugcaggaucuuggug

SEQ ID NO: 919 - RNA, 19 nt, Artificial Sequence
  Description of Artificial Sequence: Synthetic oligonucleotide
agacaugcaggaucuuggu

SEQ ID NO: 920 - RNA, 19 nt, Artificial Sequence
  Description of Artificial Sequence: Synthetic oligonucleotide
aagacaugcaggaucuugg

SEQ ID NO: 921 - RNA, 19 nt, Artificial Sequence
  Description of Artificial Sequence: Synthetic oligonucleotide
gaagacaugcaggaucuug

SEQ ID NO: 922 - RNA, 19 nt, Artificial Sequence
  Description of Artificial Sequence: Synthetic oligonucleotide
uggaagacaugcaggaucu

SEQ ID NO: 923 - RNA, 19 nt, Artificial Sequence
  Description of Artificial Sequence: Synthetic oligonucleotide
auggaagacaugcaggauc

SEQ ID NO: 924 - RNA, 19 nt, Artificial Sequence
  Description of Artificial Sequence: Synthetic oligonucleotide
caggaagccaggaagaagg

SEQ ID NO: 925 - RNA, 19 nt, Artificial Sequence
  Description of Artificial Sequence: Synthetic oligonucleotide
accaggaagccaggaagaa

SEQ ID NO: 926 - RNA, 19 nt, Artificial Sequence
  Description of Artificial Sequence: Synthetic oligonucleotide
caccaggaagccaggaaga

SEQ ID NO: 927 - RNA, 19 nt, Artificial Sequence
  Description of Artificial Sequence: Synthetic oligonucleotide
ucaccaggaagccaggaag

SEQ ID NO: 928 - RNA, 19 nt, Artificial Sequence
  Description of Artificial Sequence: Synthetic oligonucleotide
uucaccaggaagccaggaa

SEQ ID NO: 929 - RNA, 19 nt, Artificial Sequence
  Description of Artificial Sequence: Synthetic oligonucleotide
cuucaccaggaagccagga

SEQ ID NO: 930 - RNA, 19 nt, Artificial Sequence
  Description of Artificial Sequence: Synthetic oligonucleotide
ucuucaccaggaagccagg

SEQ ID NO: 931 - RNA, 19 nt, Artificial Sequence
  Description of Artificial Sequence: Synthetic oligonucleotide
aucuucaccaggaagccag

SEQ ID NO: 932 - RNA, 19 nt, Artificial Sequence
  Description of Artificial Sequence: Synthetic oligonucleotide
caucuucaccaggaagcca

SEQ ID NO: 933 - RNA, 19 nt, Artificial Sequence
  Description of Artificial Sequence: Synthetic oligonucleotide
ucaucuucaccaggaagcc

SEQ ID NO: 934 - RNA, 19 nt, Artificial Sequence
  Description of Artificial Sequence: Synthetic oligonucleotide
cucaucuucaccaggaagc

SEQ ID NO: 935 - RNA, 19 nt, Artificial Sequence
  Description of Artificial Sequence: Synthetic oligonucleotide
acucaucuucaccaggaag

SEQ ID NO: 936 - RNA, 19 nt, Artificial Sequence
  Description of Artificial Sequence: Synthetic oligonucleotide
cacucaucuucaccaggaa

SEQ ID NO: 937 - RNA, 19 nt, Artificial Sequence
  Description of Artificial Sequence: Synthetic oligonucleotide
gucgccacucaucuucacc

SEQ ID NO: 938 - RNA, 19 nt, Artificial Sequence
  Description of Artificial Sequence: Synthetic oligonucleotide
aggucgccacucaucuuca

SEQ ID NO: 939 - RNA, 19 nt, Artificial Sequence
  Description of Artificial Sequence: Synthetic oligonucleotide
agcaggucgccacucaucu

SEQ ID NO: 940 - RNA, 19 nt, Artificial Sequence
  Description of Artificial Sequence: Synthetic oligonucleotide
cagcaggucgccacucauc

SEQ ID NO: 941 - RNA, 19 nt, Artificial Sequence
  Description of Artificial Sequence: Synthetic oligonucleotide
uccagcaggucgccacuca

SEQ ID NO: 942 - RNA, 19 nt, Artificial Sequence
  Description of Artificial Sequence: Synthetic oligonucleotide
ucgacauggggcaacuuca

SEQ ID NO: 943 - RNA, 19 nt, Artificial Sequence
  Description of Artificial Sequence: Synthetic oligonucleotide
gucgacauggggcaacuuc

SEQ ID NO: 944 - RNA, 19 nt, Artificial Sequence
  Description of Artificial Sequence: Synthetic oligonucleotide
agucgacauggggcaacuu

SEQ ID NO: 945 - RNA, 19 nt, Artificial Sequence
  Description of Artificial Sequence: Synthetic oligonucleotide
uagucgacauggggcaacu

SEQ ID NO: 946 - RNA, 19 nt, Artificial Sequence
  Description of Artificial Sequence: Synthetic oligonucleotide
guagucgacauggggcaac

SEQ ID NO: 947 - RNA, 19 nt, Artificial Sequence
  Description of Artificial Sequence: Synthetic oligonucleotide
uguagucgacauggggcaa

SEQ ID NO: 948 - RNA, 19 nt, Artificial Sequence
  Description of Artificial Sequence: Synthetic oligonucleotide
auguagucgacauggggca

SEQ ID NO: 949 - RNA, 19 nt, Artificial Sequence
  Description of Artificial Sequence: Synthetic oligonucleotide
gauguagucgacauggggc

SEQ ID NO: 950 - RNA, 19 nt, Artificial Sequence
  Description of Artificial Sequence: Synthetic oligonucleotide
cucgauguagucgacaugg

SEQ ID NO: 951 - RNA, 19 nt, Artificial Sequence
  Description of Artificial Sequence: Synthetic oligonucleotide
uccucgauguagucgacau

SEQ ID NO: 952 - RNA, 19 nt, Artificial Sequence
  Description of Artificial Sequence: Synthetic oligonucleotide
cuccucgauguagucgaca

SEQ ID NO: 953 - RNA, 19 nt, Artificial Sequence
  Description of Artificial Sequence: Synthetic oligonucleotide
uccuccucgauguagucga

SEQ ID NO: 954 - RNA, 19 nt, Artificial Sequence
  Description of Artificial Sequence: Synthetic oligonucleotide
guccuccucgauguagucg

SEQ ID NO: 955 - RNA, 19 nt, Artificial Sequence
  Description of Artificial Sequence: Synthetic oligonucleotide
aguccuccucgauguaguc

SEQ ID NO: 956 - RNA, 19 nt, Artificial Sequence
  Description of Artificial Sequence: Synthetic oligonucleotide
cagcugguggagcugugug

SEQ ID NO: 957 - RNA, 19 nt, Artificial Sequence
  Description of Artificial Sequence: Synthetic oligonucleotide
aguggacacggguccccau

SEQ ID NO: 958 - RNA, 19 nt, Artificial Sequence
  Description of Artificial Sequence: Synthetic oligonucleotide
ugcagccugugaggacgug

SEQ ID NO: 959 - RNA, 19 nt, Artificial Sequence
  Description of Artificial Sequence: Synthetic oligonucleotide
cugcagccugugaggacgu

SEQ ID NO: 960 - RNA, 19 nt, Artificial Sequence
  Description of Artificial Sequence: Synthetic oligonucleotide
agcugcagccugugaggac

SEQ ID NO: 961 - RNA, 19 nt, Artificial Sequence
  Description of Artificial Sequence: Synthetic oligonucleotide
gagcugcagccugugagga

SEQ ID NO: 962 - RNA, 19 nt, Artificial Sequence
  Description of Artificial Sequence: Synthetic oligonucleotide
ugggagcugcagccuguga

SEQ ID NO: 963 - RNA, 19 nt, Artificial Sequence
  Description of Artificial Sequence: Synthetic oligonucleotide
agugggagcugcagccugu

SEQ ID NO: 964 - RNA, 19 nt, Artificial Sequence
  Description of Artificial Sequence: Synthetic oligonucleotide
agguccuccaccucccagu

SEQ ID NO: 965 - RNA, 19 nt, Artificial Sequence
  Description of Artificial Sequence: Synthetic oligonucleotide
aagguccuccaccucccag

SEQ ID NO: 966 - RNA, 19 nt, Artificial Sequence
  Description of Artificial Sequence: Synthetic oligonucleotide
caagguccuccaccuccca

SEQ ID NO: 967 - RNA, 19 nt, Artificial Sequence
  Description of Artificial Sequence: Synthetic oligonucleotide
ugccaagguccuccaccuc

SEQ ID NO: 968 - RNA, 19 nt, Artificial Sequence
  Description of Artificial Sequence: Synthetic oligonucleotide
gugccaagguccuccaccu

SEQ ID NO: 969 - RNA, 19 nt, Artificial Sequence
  Description of Artificial Sequence: Synthetic oligonucleotide
ugggugccaagguccucca

SEQ ID NO: 970 - RNA, 19 nt, Artificial Sequence
  Description of Artificial Sequence: Synthetic oligonucleotide
ugugggugccaagguccuc

SEQ ID NO: 971 - RNA, 19 nt, Artificial Sequence
  Description of Artificial Sequence: Synthetic oligonucleotide
uugugggugccaagguccu

SEQ ID NO: 972 - RNA, 19 nt, Artificial Sequence
  Description of Artificial Sequence: Synthetic oligonucleotide
cuugugggugccaaggucc

SEQ ID NO: 973 - RNA, 19 nt, Artificial Sequence
  Description of Artificial Sequence: Synthetic oligonucleotide
ucagcacaggcggcuugug

SEQ ID NO: 974 - RNA, 19 nt, Artificial Sequence
  Description of Artificial Sequence: Synthetic oligonucleotide
cucagcacaggcggcuugu

SEQ ID NO: 975 - RNA, 19 nt, Artificial Sequence
  Description of Artificial Sequence: Synthetic oligonucleotide
accucguggccucagcaca

SEQ ID NO: 976 - RNA, 19 nt, Artificial Sequence
  Description of Artificial Sequence: Synthetic oligonucleotide
ugguugggcugaccucgug

SEQ ID NO: 977 - RNA, 19 nt, Artificial Sequence
  Description of Artificial Sequence: Synthetic oligonucleotide
cugguugggcugaccucgu

SEQ ID NO: 978 - RNA, 19 nt, Artificial Sequence
  Description of Artificial Sequence: Synthetic oligonucleotide
cacugguugggcugaccuc

SEQ ID NO: 979 - RNA, 19 nt, Artificial Sequence
  Description of Artificial Sequence: Synthetic oligonucleotide
uggaugcuggccucccugu

SEQ ID NO: 980 - RNA, 19 nt, Artificial Sequence
  Description of Artificial Sequence: Synthetic oligonucleotide
aagcguggaugcuggccuc

SEQ ID NO: 981 - RNA, 19 nt, Artificial Sequence
  Description of Artificial Sequence: Synthetic oligonucleotide
gaagcguggaugcuggccu

SEQ ID NO: 982 - RNA, 19 nt, Artificial Sequence
  Description of Artificial Sequence: Synthetic oligonucleotide
aggaagcguggaugcuggc

SEQ ID NO: 983 - RNA, 19 nt, Artificial Sequence
  Description of Artificial Sequence: Synthetic oligonucleotide
agcaggaagcguggaugcu

SEQ ID NO: 984 - RNA, 19 nt, Artificial Sequence
  Description of Artificial Sequence: Synthetic oligonucleotide
cagcaggaagcguggaugc

SEQ ID NO: 985 - RNA, 19 nt, Artificial Sequence
  Description of Artificial Sequence: Synthetic oligonucleotide
uggcagcaggaagcgugga

SEQ ID NO: 986 - RNA, 19 nt, Artificial Sequence
  Description of Artificial Sequence: Synthetic oligonucleotide
auggcagcaggaagcgugg

SEQ ID NO: 987 - RNA, 19 nt, Artificial Sequence
  Description of Artificial Sequence: Synthetic oligonucleotide
cauggcagcaggaagcgug

SEQ ID NO: 988 - RNA, 19 nt, Artificial Sequence
  Description of Artificial Sequence: Synthetic oligonucleotide
uggggcauggcagcaggaa

SEQ ID NO: 989 - RNA, 19 nt, Artificial Sequence
  Description of Artificial Sequence: Synthetic oligonucleotide
uuccagaccuggggcaugg

SEQ ID NO: 990 - RNA, 19 nt, Artificial Sequence
  Description of Artificial Sequence: Synthetic oligonucleotide
auuccagaccuggggcaug

SEQ ID NO: 991 - RNA, 19 nt, Artificial Sequence
  Description of Artificial Sequence: Synthetic oligonucleotide
cauuccagaccuggggcau

SEQ ID NO: 992 - RNA, 19 nt, Artificial Sequence
  Description of Artificial Sequence: Synthetic oligonucleotide
ugcauuccagaccuggggc

SEQ ID NO: 993 - RNA, 19 nt, Artificial Sequence
  Description of Artificial Sequence: Synthetic oligonucleotide
uugcauuccagaccugggg

SEQ ID NO: 994 - RNA, 19 nt, Artificial Sequence
  Description of Artificial Sequence: Synthetic oligonucleotide
cuuugcauuccagaccugg

SEQ ID NO: 995 - RNA, 19 nt, Artificial Sequence
  Description of Artificial Sequence: Synthetic oligonucleotide
acuuugcauuccagaccug

SEQ ID NO: 996 - RNA, 19 nt, Artificial Sequence
  Description of Artificial Sequence: Synthetic oligonucleotide
gacuuugcauuccagaccu

SEQ ID NO: 997 - RNA, 19 nt, Artificial Sequence
  Description of Artificial Sequence: Synthetic oligonucleotide
ugacuuugcauuccagacc

SEQ ID NO: 998 - RNA, 19 nt, Artificial Sequence
  Description of Artificial Sequence: Synthetic oligonucleotide
uugacuuugcauuccagac

SEQ ID NO: 999 - RNA, 19 nt, Artificial Sequence
  Description of Artificial Sequence: Synthetic oligonucleotide
cuugacuuugcauuccaga

SEQ ID NO: 1000 - RNA, 19 nt, Artificial Sequence
  Description of Artificial Sequence: Synthetic oligonucleotide
uccuugacuuugcauucca

SEQ ID NO: 1001 - RNA, 19 nt, Artificial Sequence
  Description of Artificial Sequence: Synthetic oligonucleotide
cuccuugacuuugcauucc

SEQ ID NO: 1002 - RNA, 19 nt, Artificial Sequence
  Description of Artificial Sequence: Synthetic oligonucleotide
ugcuccuugacuuugcauu

SEQ ID NO: 1003 - RNA, 19 nt, Artificial Sequence
  Description of Artificial Sequence: Synthetic oligonucleotide
augcuccuugacuuugcau

SEQ ID NO: 1004 - RNA, 19 nt, Artificial Sequence
  Description of Artificial Sequence: Synthetic oligonucleotide
caugcuccuugacuuugca

SEQ ID NO: 1005 - RNA, 19 nt, Artificial Sequence
  Description of Artificial Sequence: Synthetic oligonucleotide
uccaugcuccuugacuuug

SEQ ID NO: 1006 - RNA, 19 nt, Artificial Sequence
  Description of Artificial Sequence: Synthetic oligonucleotide
uuccaugcuccuugacuuu

SEQ ID NO: 1007 - RNA, 19 nt, Artificial Sequence
  Description of Artificial Sequence: Synthetic oligonucleotide
auuccaugcuccuugacuu

SEQ ID NO: 1008 - RNA, 19 nt, Artificial Sequence
  Description of Artificial Sequence: Synthetic oligonucleotide
ugaggggccgggauuccau

SEQ ID NO: 1009 - RNA, 19 nt, Artificial Sequence
  Description of Artificial Sequence: Synthetic oligonucleotide
cuucgcuggugcugccugu

SEQ ID NO: 1010 - RNA, 19 nt, Artificial Sequence
  Description of Artificial Sequence: Synthetic oligonucleotide
cagcagauggcaacggcug

SEQ ID NO: 1011 - RNA, 19 nt, Artificial Sequence
  Description of Artificial Sequence: Synthetic oligonucleotide
uccggcagcagauggcaac

SEQ ID NO: 1012 - RNA, 19 nt, Artificial Sequence
  Description of Artificial Sequence: Synthetic oligonucleotide
cuccggcagcagauggcaa

SEQ ID NO: 1013 - RNA, 19 nt, Artificial Sequence
  Description of Artificial Sequence: Synthetic oligonucleotide
ucacuggagcuccugggag

SEQ ID NO: 1014 - RNA, 19 nt, Artificial Sequence
  Description of Artificial Sequence: Synthetic oligonucleotide
gucacuggagcuccuggga

SEQ ID NO: 1015 - RNA, 19 nt, Artificial Sequence
  Description of Artificial Sequence: Synthetic oligonucleotide
ugucacuggagcuccuggg

SEQ ID NO: 1016 - RNA, 19 nt, Artificial Sequence
  Description of Artificial Sequence: Synthetic oligonucleotide
cugucacuggagcuccugg

SEQ ID NO: 1017 - RNA, 19 nt, Artificial Sequence
  Description of Artificial Sequence: Synthetic oligonucleotide
uggggcugucacuggagcu

SEQ ID NO: 1018 - RNA, 19 nt, Artificial Sequence
  Description of Artificial Sequence: Synthetic oligonucleotide
auggggcugucacuggagc

SEQ ID NO: 1019 - RNA, 19 nt, Artificial Sequence
  Description of Artificial Sequence: Synthetic oligonucleotide
gauggggcugucacuggag

SEQ ID NO: 1020 - RNA, 19 nt, Artificial Sequence
  Description of Artificial Sequence: Synthetic oligonucleotide
ugggauggggcugucacug

SEQ ID NO: 1021 - RNA, 19 nt, Artificial Sequence
  Description of Artificial Sequence: Synthetic oligonucleotide
cugggauggggcugucacu

SEQ ID NO: 1022 - RNA, 19 nt, Artificial Sequence
  Description of Artificial Sequence: Synthetic oligonucleotide
uccugggauggggcuguca

SEQ ID NO: 1023 - RNA, 19 nt, Artificial Sequence
  Description of Artificial Sequence: Synthetic oligonucleotide
auccugggauggggcuguc

SEQ ID NO: 1024 - RNA, 19 nt, Artificial Sequence
  Description of Artificial Sequence: Synthetic oligonucleotide
cauccugggauggggcugu

SEQ ID NO: 1025 - RNA, 19 nt, Artificial Sequence
  Description of Artificial Sequence: Synthetic oligonucleotide
uaaagcucagccccagccc

SEQ ID NO: 1026 - RNA, 19 nt, Artificial Sequence
  Description of Artificial Sequence: Synthetic oligonucleotide
uuaaagcucagccccagcc

SEQ ID NO: 1027 - RNA, 19 nt, Artificial Sequence
  Description of Artificial Sequence: Synthetic oligonucleotide
uuuaaagcucagccccagc

SEQ ID NO: 1028 - RNA, 19 nt, Artificial Sequence
  Description of Artificial Sequence: Synthetic oligonucleotide
accauuuuaaagcucagcc

SEQ ID NO: 1029 - RNA, 19 nt, Artificial Sequence
  Description of Artificial Sequence: Synthetic oligonucleotide
aaccauuuuaaagcucagc

SEQ ID NO: 1030 - RNA, 19 nt, Artificial Sequence
  Description of Artificial Sequence: Synthetic oligonucleotide
gaaccauuuuaaagcucag

SEQ ID NO: 1031 - RNA, 19 nt, Artificial Sequence
  Description of Artificial Sequence: Synthetic oligonucleotide
agcuuccuggcaccuccac

SEQ ID NO: 1032 - RNA, 19 nt, Artificial Sequence
  Description of Artificial Sequence: Synthetic oligonucleotide
gagcuuccuggcaccucca

SEQ ID NO: 1033 - RNA, 19 nt, Artificial Sequence
  Description of Artificial Sequence: Synthetic oligonucleotide
agggagcuuccuggcaccu

SEQ ID NO: 1034 - RNA, 19 nt, Artificial Sequence
  Description of Artificial Sequence: Synthetic oligonucleotide
gugaaaugccccacaguga

SEQ ID NO: 1035 - RNA, 19 nt, Artificial Sequence
  Description of Artificial Sequence: Synthetic oligonucleotide
uggugaaaugccccacagu

SEQ ID NO: 1036 - RNA, 19 nt, Artificial Sequence
  Description of Artificial Sequence: Synthetic oligonucleotide
auggugaaaugccccacag

SEQ ID NO: 1037 - RNA, 19 nt, Artificial Sequence
  Description of Artificial Sequence: Synthetic oligonucleotide
aauggugaaaugccccaca

SEQ ID NO: 1038 - RNA, 19 nt, Artificial Sequence
  Description of Artificial Sequence: Synthetic oligonucleotide
uugggagcagcuggcagca

SEQ ID NO: 1039 - RNA, 19 nt, Artificial Sequence
  Description of Artificial Sequence: Synthetic oligonucleotide
aacaagagcucaauaaaag

SEQ ID NO: 1040 - RNA, 19 nt, Artificial Sequence
  Description of Artificial Sequence: Synthetic oligonucleotide
cugccuccuugguggagac

SEQ ID NO: 1041 - RNA, 19 nt, Artificial Sequence
  Description of Artificial Sequence: Synthetic oligonucleotide
uccugccuccuugguggag

SEQ ID NO: 1042 - RNA, 19 nt, Artificial Sequence
  Description of Artificial Sequence: Synthetic oligonucleotide
auccugccuccuuggugga

SEQ ID NO: 1043 - RNA, 19 nt, Artificial Sequence
  Description of Artificial Sequence: Synthetic oligonucleotide
aauccugccuccuuggugg

SEQ ID NO: 1044 - RNA, 19 nt, Artificial Sequence
  Description of Artificial Sequence: Synthetic oligonucleotide
agaauccugccuccuuggu

SEQ ID NO: 1045 - RNA, 19 nt, Artificial Sequence
  Description of Artificial Sequence: Synthetic oligonucleotide
aagaauccugccuccuugg

SEQ ID NO: 1046 - RNA, 19 nt, Artificial Sequence
  Description of Artificial Sequence: Synthetic oligonucleotide
gaagaauccugccuccuug

SEQ ID NO: 1047 - RNA, 19 nt, Artificial Sequence
  Description of Artificial Sequence: Synthetic oligonucleotide
ugggaagaauccugccucc

SEQ ID NO: 1048 - RNA, 19 nt, Artificial Sequence
  Description of Artificial Sequence: Synthetic oligonucleotide
augggaagaauccugccuc

SEQ ID NO: 1049 - RNA, 19 nt, Artificial Sequence
  Description of Artificial Sequence: Synthetic oligonucleotide
caugggaagaauccugccu

SEQ ID NO: 1050 - RNA, 19 nt, Artificial Sequence
  Description of Artificial Sequence: Synthetic oligonucleotide
gagaugagggccaucagca

SEQ ID NO: 1051 - RNA, 19 nt, Artificial Sequence
  Description of Artificial Sequence: Synthetic oligonucleotide
uggagaugagggccaucag

SEQ ID NO: 1052 - RNA, 19 nt, Artificial Sequence
  Description of Artificial Sequence: Synthetic oligonucleotide
cuggagaugagggccauca

SEQ ID NO: 1053 - RNA, 19 nt, Artificial Sequence
  Description of Artificial Sequence: Synthetic oligonucleotide
agcuggagaugagggccau

SEQ ID NO: 1054 - RNA, 19 nt, Artificial Sequence
  Description of Artificial Sequence: Synthetic oligonucleotide
agaugccauccagaaagcu

SEQ ID NO: 1055 - RNA, 19 nt, Artificial Sequence
  Description of Artificial Sequence: Synthetic oligonucleotide
uagaugccauccagaaagc

SEQ ID NO: 1056 - RNA, 19 nt, Artificial Sequence
  Description of Artificial Sequence: Synthetic oligonucleotide
cuagaugccauccagaaag

SEQ ID NO: 1057 - RNA, 19 nt, Artificial Sequence
  Description of Artificial Sequence: Synthetic oligonucleotide
cuggcuagaugccauccag

SEQ ID NO: 1058 - RNA, 19 nt, Artificial Sequence
  Description of Artificial Sequence: Synthetic oligonucleotide
ucuggcuagaugccaucca

SEQ ID NO: 1059 - RNA, 19 nt, Artificial Sequence
  Description of Artificial Sequence: Synthetic oligonucleotide
cucuggcuagaugccaucc

SEQ ID NO: 1060 - RNA, 19 nt, Artificial Sequence
  Description of Artificial Sequence: Synthetic oligonucleotide
agccucuggcuagaugcca

SEQ ID NO: 1061 - RNA, 19 nt, Artificial Sequence
  Description of Artificial Sequence: Synthetic oligonucleotide
cagccucuggcuagaugcc

SEQ ID NO: 1062 - RNA, 19 nt, Artificial Sequence
  Description of Artificial Sequence: Synthetic oligonucleotide
uccagccucuggcuagaug

SEQ ID NO: 1063 - RNA, 19 nt, Artificial Sequence
  Description of Artificial Sequence: Synthetic oligonucleotide
ucuccagccucuggcuaga

SEQ ID NO: 1064 - RNA, 19 nt, Artificial Sequence
  Description of Artificial Sequence: Synthetic oligonucleotide
agcacagccuggcauagag

SEQ ID NO: 1065 - RNA, 19 nt, Artificial Sequence
  Description of Artificial Sequence: Synthetic oligonucleotide
uagcacagccuggcauaga

SEQ ID NO: 1066 - RNA, 19 nt, Artificial Sequence
  Description of Artificial Sequence: Synthetic oligonucleotide
uggagcggguuggcugaga

SEQ ID NO: 1067 - RNA, 19 nt, Artificial Sequence
  Description of Artificial Sequence: Synthetic oligonucleotide
aguggagcggguuggcuga

SEQ ID NO: 1068 - RNA, 19 nt, Artificial Sequence
  Description of Artificial Sequence: Synthetic oligonucleotide
uaguggagcggguuggcug

SEQ ID NO: 1069 - RNA, 19 nt, Artificial Sequence
  Description of Artificial Sequence: Synthetic oligonucleotide
guaguggagcggguuggcu

SEQ ID NO: 1070 - RNA, 19 nt, Artificial Sequence
  Description of Artificial Sequence: Synthetic oligonucleotide
ugugugagcuuggcaggca

SEQ ID NO: 1071 - RNA, 19 nt, Artificial Sequence
  Description of Artificial Sequence: Synthetic oligonucleotide
cugugugagcuuggcaggc

SEQ ID NO: 1072 - RNA, 19 nt, Artificial Sequence
  Description of Artificial Sequence: Synthetic oligonucleotide
ugcugugugagcuuggcag

SEQ ID NO: 1073 - RNA, 19 nt, Artificial Sequence
  Description of Artificial Sequence: Synthetic oligonucleotide
cugcugugugagcuuggca

SEQ ID NO: 1074 - RNA, 19 nt, Artificial Sequence
  Description of Artificial Sequence: Synthetic oligonucleotide
uccugcugugugagcuugg

SEQ ID NO: 1075 - RNA, 19 nt, Artificial Sequence
  Description of Artificial Sequence: Synthetic oligonucleotide
uuccugcugugugagcuug

SEQ ID NO: 1076 - RNA, 19 nt, Artificial Sequence
  Description of Artificial Sequence: Synthetic oligonucleotide
guuccugcugugugagcuu

SEQ ID NO: 1077 - RNA, 19 nt, Artificial Sequence
  Description of Artificial Sequence: Synthetic oligonucleotide
aguuccugcugugugagcu

SEQ ID NO: 1078 - RNA, 19 nt, Artificial Sequence
  Description of Artificial Sequence: Synthetic oligonucleotide
caguuccugcugugugagc

SEQ ID NO: 1079 - RNA, 19 nt, Artificial Sequence
  Description of Artificial Sequence: Synthetic oligonucleotide
ucaguuccugcugugugag

SEQ ID NO: 1080 - RNA, 19 nt, Artificial Sequence
  Description of Artificial Sequence: Synthetic oligonucleotide
cucaguuccugcuguguga

SEQ ID NO: 1081 - RNA, 19 nt, Artificial Sequence
  Description of Artificial Sequence: Synthetic oligonucleotide
uggcucaguuccugcugug

SEQ ID NO: 1082 - RNA, 19 nt, Artificial Sequence
  Description of Artificial Sequence: Synthetic oligonucleotide
cuggcucaguuccugcugu

SEQ ID NO: 1083 - RNA, 19 nt, Artificial Sequence
  Description of Artificial Sequence: Synthetic oligonucleotide
ucuggcucaguuccugcug

SEQ ID NO: 1084 - RNA, 19 nt, Artificial Sequence
  Description of Artificial Sequence: Synthetic oligonucleotide
uucuggcucaguuccugcu

SEQ ID NO: 1085 - RNA, 19 nt, Artificial Sequence
  Description of Artificial Sequence: Synthetic oligonucleotide
uuucuggcucaguuccugc

SEQ ID NO: 1086 - RNA, 19 nt, Artificial Sequence
  Description of Artificial Sequence: Synthetic oligonucleotide
guuucuggcucaguuccug

SEQ ID NO: 1087 - RNA, 19 nt, Artificial Sequence
  Description of Artificial Sequence: Synthetic oligonucleotide
aagaggcuuggcuucagag

SEQ ID NO: 1088 - RNA, 19 nt, Artificial Sequence
  Description of Artificial Sequence: Synthetic oligonucleotide
gaagaggcuuggcuucaga

SEQ ID NO: 1089 - RNA, 19 nt, Artificial Sequence
  Description of Artificial Sequence: Synthetic oligonucleotide
agaagaggcuuggcuucag

SEQ ID NO: 1090 - RNA, 19 nt, Artificial Sequence
  Description of Artificial Sequence: Synthetic oligonucleotide
aagaagaggcuuggcuuca

SEQ ID NO: 1091 - RNA, 19 nt, Artificial Sequence
  Description of Artificial Sequence: Synthetic oligonucleotide
uaagaagaggcuuggcuuc

SEQ ID NO: 1092 - RNA, 19 nt, Artificial Sequence
  Description of Artificial Sequence: Synthetic oligonucleotide
guaagaagaggcuuggcuu

SEQ ID NO: 1093 - RNA, 19 nt, Artificial Sequence
  Description of Artificial Sequence: Synthetic oligonucleotide
aaguaagaagaggcuuggc

SEQ ID NO: 1094 - RNA, 19 nt, Artificial Sequence
  Description of Artificial Sequence: Synthetic oligonucleotide
ucccagccucacuguuacc

SEQ ID NO: 1095 - RNA, 19 nt, Artificial Sequence
  Description of Artificial Sequence: Synthetic oligonucleotide
uucccagccucacuguuac

SEQ ID NO: 1096 - RNA, 19 nt, Artificial Sequence
  Description of Artificial Sequence: Synthetic oligonucleotide
cuucccagccucacuguua

SEQ ID NO: 1097 - RNA, 19 nt, Artificial Sequence
  Description of Artificial Sequence: Synthetic oligonucleotide
uccccuucccagccucacu

SEQ ID NO: 1098 - RNA, 19 nt, Artificial Sequence
  Description of Artificial Sequence: Synthetic oligonucleotide
uuccccuucccagccucac

SEQ ID NO: 1099 - RNA, 19 nt, Artificial Sequence
  Description of Artificial Sequence: Synthetic oligonucleotide
guuccccuucccagccuca

SEQ ID NO: 1100 - RNA, 19 nt, Artificial Sequence
  Description of Artificial Sequence: Synthetic oligonucleotide
uguuccccuucccagccuc

SEQ ID NO: 1101 - RNA, 19 nt, Artificial Sequence
  Description of Artificial Sequence: Synthetic oligonucleotide
guguuccccuucccagccu

SEQ ID NO: 1102 - RNA, 19 nt, Artificial Sequence
  Description of Artificial Sequence: Synthetic oligonucleotide
uguguuccccuucccagcc

SEQ ID NO: 1103 - RNA, 19 nt, Artificial Sequence
  Description of Artificial Sequence: Synthetic oligonucleotide
cuguguuccccuucccagc

SEQ ID NO: 1104 - RNA, 19 nt, Artificial Sequence
  Description of Artificial Sequence: Synthetic oligonucleotide
ucuguguuccccuucccag

SEQ ID NO: 1105 - RNA, 19 nt, Artificial Sequence
  Description of Artificial Sequence: Synthetic oligonucleotide
gucuguguuccccuuccca

SEQ ID NO: 1106 - RNA, 19 nt, Artificial Sequence
  Description of Artificial Sequence: Synthetic oligonucleotide
uggucuguguuccccuucc

SEQ ID NO: 1107 - RNA, 19 nt, Artificial Sequence
  Description of Artificial Sequence: Synthetic oligonucleotide
cuggucuguguuccccuuc

SEQ ID NO: 1108 - RNA, 19 nt, Artificial Sequence
  Description of Artificial Sequence: Synthetic oligonucleotide
uccuggucuguguuccccu

SEQ ID NO: 1109 - RNA, 19 nt, Artificial Sequence
  Description of Artificial Sequence: Synthetic oligonucleotide
uuccuggucuguguucccc

SEQ ID NO: 1110 - RNA, 19 nt, Artificial Sequence
  Description of Artificial Sequence: Synthetic oligonucleotide
cuuccuggucuguguuccc

SEQ ID NO: 1111 - RNA, 19 nt, Artificial Sequence
  Description of Artificial Sequence: Synthetic oligonucleotide
agcuuccuggucuguguuc

SEQ ID NO: 1112 - RNA, 19 nt, Artificial Sequence
  Description of Artificial Sequence: Synthetic oligonucleotide
gagcuuccuggucuguguu

SEQ ID NO: 1113 - RNA, 19 nt, Artificial Sequence
  Description of Artificial Sequence: Synthetic oligonucleotide
cucaaggagggacaguugu

SEQ ID NO: 1114 - RNA, 19 nt, Artificial Sequence
  Description of Artificial Sequence: Synthetic oligonucleotide
ugcucaaggagggacaguu

SEQ ID NO: 1115 - RNA, 19 nt, Artificial Sequence
  Description of Artificial Sequence: Synthetic oligonucleotide
uggugcucaaggagggaca

SEQ ID NO: 1116 - RNA, 19 nt, Artificial Sequence
  Description of Artificial Sequence: Synthetic oligonucleotide
cuggugcucaaggagggac

SEQ ID NO: 1117 - RNA, 19 nt, Artificial Sequence
  Description of Artificial Sequence: Synthetic oligonucleotide
uggggcuggugcucaagga

SEQ ID NO: 1118 - RNA, 19 nt, Artificial Sequence
  Description of Artificial Sequence: Synthetic oligonucleotide
uugcuuggguggggcuggu

SEQ ID NO: 1119 - RNA, 19 nt, Artificial Sequence
  Description of Artificial Sequence: Synthetic oligonucleotide
ugcuugcuuggguggggcu

SEQ ID NO: 1120 - RNA, 19 nt, Artificial Sequence
  Description of Artificial Sequence: Synthetic oligonucleotide
ucugcuugcuugggugggg

SEQ ID NO: 1121 - RNA, 19 nt, Artificial Sequence
  Description of Artificial Sequence: Synthetic oligonucleotide
gucugcuugcuuggguggg

SEQ ID NO: 1122 - RNA, 19 nt, Artificial Sequence
  Description of Artificial Sequence: Synthetic oligonucleotide
ugucugcuugcuugggugg

SEQ ID NO: 1123 - RNA, 19 nt, Artificial Sequence
  Description of Artificial Sequence: Synthetic oligonucleotide
augucugcuugcuugggug

SEQ ID NO: 1124 - RNA, 19 nt, Artificial Sequence
  Description of Artificial Sequence: Synthetic oligonucleotide
aaugucugcuugcuugggu

SEQ ID NO: 1125 - RNA, 19 nt, Artificial Sequence
  Description of Artificial Sequence: Synthetic oligonucleotide
aaaugucugcuugcuuggg

SEQ ID NO: 1126 - RNA, 19 nt, Artificial Sequence
  Description of Artificial Sequence: Synthetic oligonucleotide
uaaaugucugcuugcuugg

SEQ ID NO: 1127 - RNA, 19 nt, Artificial Sequence
  Description of Artificial Sequence: Synthetic oligonucleotide
auaaaugucugcuugcuug

SEQ ID NO: 1128 - RNA, 19 nt, Artificial Sequence
  Description of Artificial Sequence: Synthetic oligonucleotide
gauaaaugucugcuugcuu

SEQ ID NO: 1129 - RNA, 19 nt, Artificial Sequence
  Description of Artificial Sequence: Synthetic oligonucleotide
agauaaaugucugcuugcu

SEQ ID NO: 1130 - RNA, 19 nt, Artificial Sequence
  Description of Artificial Sequence: Synthetic oligonucleotide
aagauaaaugucugcuugc

SEQ ID NO: 1131 - RNA, 19 nt, Artificial Sequence
  Description of Artificial Sequence: Synthetic oligonucleotide
aaagauaaaugucugcuug

SEQ ID NO: 1132 - RNA, 19 nt, Artificial Sequence
  Description of Artificial Sequence: Synthetic oligonucleotide
aaaagauaaaugucugcuu

SEQ ID NO: 1133 - RNA, 19 nt, Artificial Sequence
  Description of Artificial Sequence: Synthetic oligonucleotide
caaaagauaaaugucugcu

SEQ ID NO: 1134 - RNA, 19 nt, Artificial Sequence
  Description of Artificial Sequence: Synthetic oligonucleotide
acccaaaagauaaaugucu

SEQ ID NO: 1135 - RNA, 19 nt, Artificial Sequence
  Description of Artificial Sequence: Synthetic oligonucleotide
gacccaaaagauaaauguc

SEQ ID NO: 1136 - RNA, 19 nt, Artificial Sequence
  Description of Artificial Sequence: Synthetic oligonucleotide
gaggacagacccaaaagau

SEQ ID NO: 1137 - RNA, 19 nt, Artificial Sequence
  Description of Artificial Sequence: Synthetic oligonucleotide
agaggacagacccaaaaga

SEQ ID NO: 1138 - RNA, 19 nt, Artificial Sequence
  Description of Artificial Sequence: Synthetic oligonucleotide
gagaggacagacccaaaag

SEQ ID NO: 1139 - RNA, 19 nt, Artificial Sequence
  Description of Artificial Sequence: Synthetic oligonucleotide
agagaggacagacccaaaa

SEQ ID NO: 1140 - RNA, 19 nt, Artificial Sequence
  Description of Artificial Sequence: Synthetic oligonucleotide
cagagaggacagacccaaa

SEQ ID NO: 1141 - RNA, 19 nt, Artificial Sequence
  Description of Artificial Sequence: Synthetic oligonucleotide
acagagaggacagacccaa

SEQ ID NO: 1142 - RNA, 19 nt, Artificial Sequence
  Description of Artificial Sequence: Synthetic oligonucleotide
aacagagaggacagaccca

SEQ ID NO: 1143 - RNA, 19 nt, Artificial Sequence
  Description of Artificial Sequence: Synthetic oligonucleotide
caacagagaggacagaccc

SEQ ID NO: 1144 - RNA, 19 nt, Artificial Sequence
  Description of Artificial Sequence: Synthetic oligonucleotide
aggcaacagagaggacaga

SEQ ID NO: 1145 - RNA, 19 nt, Artificial Sequence
  Description of Artificial Sequence: Synthetic oligonucleotide
aaggcaacagagaggacag

SEQ ID NO: 1146 - RNA, 19 nt, Artificial Sequence
  Description of Artificial Sequence: Synthetic oligonucleotide
aaaggcaacagagaggaca

SEQ ID NO: 1147 - RNA, 19 nt, Artificial Sequence
  Description of Artificial Sequence: Synthetic oligonucleotide
aaaaggcaacagagaggac

SEQ ID NO: 1148 - RNA, 19 nt, Artificial Sequence
  Description of Artificial Sequence: Synthetic oligonucleotide
aacccagaauaaauaucuu

SEQ ID NO: 1149 - RNA, 19 nt, Artificial Sequence
  Description of Artificial Sequence: Synthetic oligonucleotide
aaacccagaauaaauaucu

SEQ ID NO: 1150 - RNA, 19 nt, Artificial Sequence
  Description of Artificial Sequence: Synthetic oligonucleotide
aaaacccagaauaaauauc

SEQ ID NO: 1151 - RNA, 19 nt, Artificial Sequence
  Description of Artificial Sequence: Synthetic oligonucleotide
accaccacguaggugccag

SEQ ID NO: 1152 - RNA, 19 nt, Artificial Sequence
  Description of Artificial Sequence: Synthetic oligonucleotide
ucgcuggugcugccuguag

SEQ ID NO: 1153 - RNA, 19 nt, Artificial Sequence
  Description of Artificial Sequence: Synthetic oligonucleotide
uuccuggcaccuccaccug

SEQ ID NO: 1154 - RNA, 19 nt, Artificial Sequence
  Description of Artificial Sequence: Synthetic oligonucleotide
ugaaaugccccacagugag

SEQ ID NO: 1155 - RNA, 19 nt, Artificial Sequence
  Description of Artificial Sequence: Synthetic oligonucleotide
ugugagcuuggcaggcacg

SEQ ID NO: 1156 - RNA, 19 nt, Artificial Sequence
  Description of Artificial Sequence: Synthetic oligonucleotide
aaccgugcccuucccuugg

SEQ ID NO: 1157 - RNA, 19 nt, Artificial Sequence
  Description of Artificial Sequence: Synthetic oligonucleotide
aagcaaaacaggucuagag

SEQ ID NO: 1158 - RNA, 19 nt, Artificial Sequence
  Description of Artificial Sequence: Synthetic oligonucleotide
aagcaaaacaggucuaggg

SEQ ID NO: 1159 - RNA, 19 nt, Artificial Sequence
  Description of Artificial Sequence: Synthetic oligonucleotide
ugcaaaacagcugccaacc

SEQ ID NO: 1160 - RNA, 19 nt, Artificial Sequence
  Description of Artificial Sequence: Synthetic oligonucleotide
cugcaaaacagcugccaac

SEQ ID NO: 1161 - RNA, 19 nt, Artificial Sequence
  Description of Artificial Sequence: Synthetic oligonucleotide
uccugcaaaacagcugcca

SEQ ID NO: 1162 - RNA, 19 nt, Artificial Sequence
  Description of Artificial Sequence: Synthetic oligonucleotide
guccugcaaaacagcugcc

SEQ ID NO: 1163 - RNA, 19 nt, Artificial Sequence
  Description of Artificial Sequence: Synthetic oligonucleotide
aguccugcaaaacagcugc

SEQ ID NO: 1164 - RNA, 19 nt, Artificial Sequence
  Description of Artificial Sequence: Synthetic oligonucleotide
cuguggccauccguguagg

SEQ ID NO: 1165 - RNA, 19 nt, Artificial Sequence
  Description of Artificial Sequence: Synthetic oligonucleotide
agcucagcagcuccucauc

SEQ ID NO: 1166 - RNA, 19 nt, Artificial Sequence
  Description of Artificial Sequence: Synthetic oligonucleotide
acuggagcagcucagcagc

SEQ ID NO: 1167 - RNA, 19 nt, Artificial Sequence
  Description of Artificial Sequence: Synthetic oligonucleotide
aaacuggagcagcucagca

SEQ ID NO: 1168 - RNA, 19 nt, Artificial Sequence
  Description of Artificial Sequence: Synthetic oligonucleotide
gaaacuggagcagcucagc

SEQ ID NO: 1169 - RNA, 19 nt, Artificial Sequence
  Description of Artificial Sequence: Synthetic oligonucleotide
agaaacuggagcagcucag

SEQ ID NO: 1170 - RNA, 19 nt, Artificial Sequence
  Description of Artificial Sequence: Synthetic oligonucleotide
uggagaaacuggagcagcu

SEQ ID NO: 1171 - RNA, 19 nt, Artificial Sequence
  Description of Artificial Sequence: Synthetic oligonucleotide
cuggagaaacuggagcagc

SEQ ID NO: 1172 - RNA, 19 nt, Artificial Sequence
  Description of Artificial Sequence: Synthetic oligonucleotide
uccuggagaaacuggagca

SEQ ID NO: 1173 - RNA, 19 nt, Artificial Sequence
  Description of Artificial Sequence: Synthetic oligonucleotide
acuccuggagaaacuggag

SEQ ID NO: 1174 - RNA, 19 nt, Artificial Sequence
  Description of Artificial Sequence: Synthetic oligonucleotide
ucccacuccuggagaaacu

SEQ ID NO: 1175 - RNA, 19 nt, Artificial Sequence
  Description of Artificial Sequence: Synthetic oligonucleotide
cuucccacuccuggagaaa

SEQ ID NO: 1176 - RNA, 19 nt, Artificial Sequence
  Description of Artificial Sequence: Synthetic oligonucleotide
uggcaauggcguagacacc

SEQ ID NO: 1177 - RNA, 19 nt, Artificial Sequence
  Description of Artificial Sequence: Synthetic oligonucleotide
cuggcaauggcguagacac

SEQ ID NO: 1178 - RNA, 19 nt, Artificial Sequence
  Description of Artificial Sequence: Synthetic oligonucleotide
accuggcaauggcguagac

SEQ ID NO: 1179 - RNA, 19 nt, Artificial Sequence
  Description of Artificial Sequence: Synthetic oligonucleotide
caccuggcaauggcguaga

SEQ ID NO: 1180 - RNA, 19 nt, Artificial Sequence
  Description of Artificial Sequence: Synthetic oligonucleotide
cagcaccuggcaauggcgu

SEQ ID NO: 1181 - RNA, 19 nt, Artificial Sequence
  Description of Artificial Sequence: Synthetic oligonucleotide
caggcagcaccuggcaaug

SEQ ID NO: 1182 - RNA, 19 nt, Artificial Sequence
  Description of Artificial Sequence: Synthetic oligonucleotide
uguguggacgcugcaguug

SEQ ID NO: 1183 - RNA, 19 nt, Artificial Sequence
  Description of Artificial Sequence: Synthetic oligonucleotide
cuguguggacgcugcaguu

SEQ ID NO: 1184 - RNA, 19 nt, Artificial Sequence
  Description of Artificial Sequence: Synthetic oligonucleotide
agcuguguggacgcugcag

SEQ ID NO: 1185 - RNA, 19 nt, Artificial Sequence
  Description of Artificial Sequence: Synthetic oligonucleotide
gagcuguguggacgcugca

SEQ ID NO: 1186 - RNA, 19 nt, Artificial Sequence
  Description of Artificial Sequence: Synthetic oligonucleotide
uggagcuguguggacgcug

SEQ ID NO: 1187 - RNA, 19 nt, Artificial Sequence
  Description of Artificial Sequence: Synthetic oligonucleotide
guggagcuguguggacgcu

SEQ ID NO: 1188 - RNA, 19 nt, Artificial Sequence
  Description of Artificial Sequence: Synthetic oligonucleotide
ugguggagcuguguggacg

SEQ ID NO: 1189 - RNA, 19 nt, Artificial Sequence
  Description of Artificial Sequence: Synthetic oligonucleotide
cugguggagcuguguggac

SEQ ID NO: 1190 - RNA, 19 nt, Artificial Sequence
  Description of Artificial Sequence: Synthetic oligonucleotide
agcugguggagcugugugg

SEQ ID NO: 1191 - RNA, 19 nt, Artificial Sequence
  Description of Artificial Sequence: Synthetic oligonucleotide
uuugcauuccagaccuggg

SEQ ID NO: 1192 - RNA, 19 nt, Artificial Sequence
  Description of Artificial Sequence: Synthetic oligonucleotide
caaaacagcugccaaccug

SEQ ID NO: 1193 - RNA, 19 nt, Artificial Sequence
  Description of Artificial Sequence: Synthetic oligonucleotide
caguccugcaaaacagcug

SEQ ID NO: 1194 - RNA, 19 nt, Artificial Sequence
  Description of Artificial Sequence: Synthetic oligonucleotide
acaguccugcaaaacagcu

SEQ ID NO: 1195 - RNA, 19 nt, Artificial Sequence
  Description of Artificial Sequence: Synthetic oligonucleotide
cagcucagcagcuccucau

SEQ ID NO: 1196 - RNA, 19 nt, Artificial Sequence
  Description of Artificial Sequence: Synthetic oligonucleotide
aacuggagcagcucagcag

SEQ ID NO: 1197 - RNA, 19 nt, Artificial Sequence
  Description of Artificial Sequence: Synthetic oligonucleotide
gagaaacuggagcagcuca

SEQ ID NO: 1198 - RNA, 19 nt, Artificial Sequence
  Description of Artificial Sequence: Synthetic oligonucleotide
cuccuggagaaacuggagc

SEQ ID NO: 1199 - RNA, 19 nt, Artificial Sequence
  Description of Artificial Sequence: Synthetic oligonucleotide
cacuccuggagaaacugga

SEQ ID NO: 1200 - RNA, 19 nt, Artificial Sequence
  Description of Artificial Sequence: Synthetic oligonucleotide
uucccacuccuggagaaac

SEQ ID NO: 1201 - RNA, 19 nt, Artificial Sequence
  Description of Artificial Sequence: Synthetic oligonucleotide
caaaagcguugugggcccg

SEQ ID NO: 1202 - RNA, 19 nt, Artificial Sequence
  Description of Artificial Sequence: Synthetic oligonucleotide
auggcguagacacccucac

SEQ ID NO: 1203 - RNA, 19 nt, Artificial Sequence
  Description of Artificial Sequence: Synthetic oligonucleotide
aauggcguagacacccuca

SEQ ID NO: 1204 - RNA, 19 nt, Artificial Sequence
  Description of Artificial Sequence: Synthetic oligonucleotide
agcaccuggcaauggcgua

SEQ ID NO: 1205 - RNA, 19 nt, Artificial Sequence
  Description of Artificial Sequence: Synthetic oligonucleotide
aggcagcaccuggcaaugg

SEQ ID NO: 1206 - RNA, 19 nt, Artificial Sequence
  Description of Artificial Sequence: Synthetic oligonucleotide
agcaggcagcaccuggcaa

SEQ ID NO: 1207 - RNA, 19 nt, Artificial Sequence
  Description of Artificial Sequence: Synthetic oligonucleotide
uagcaggcagcaccuggca

SEQ ID NO: 1208 - RNA, 19 nt, Artificial Sequence
  Description of Artificial Sequence: Synthetic oligonucleotide
gaacaagagcucaauaaaa

SEQ ID NO: 1209 - RNA, 19 nt, Artificial Sequence
  Description of Artificial Sequence: Synthetic oligonucleotide
aagcaaaacaggucuagaa

SEQ ID NO: 1210 - RNA, 19 nt, Artificial Sequence
  Description of Artificial Sequence: Synthetic oligonucleotide
gagcaaaacaggucuagaa

SEQ ID NO: 1211 - RNA, 19 nt, Artificial Sequence
  Description of Artificial Sequence: Synthetic oligonucleotide
aggcaaaacaggucuagaa

SEQ ID NO: 1212 - RNA, 19 nt, Artificial Sequence
  Description of Artificial Sequence: Synthetic oligonucleotide
aaguaaaacaggucuagaa

SEQ ID NO: 1213 - RNA, 19 nt, Artificial Sequence
  Description of Artificial Sequence: Synthetic oligonucleotide
aagcaaaauaggucuagaa

SEQ ID NO: 1214 - RNA, 19 nt, Artificial Sequence
  Description of Artificial Sequence: Synthetic oligonucleotide
aagcaaaacagguuuagaa

SEQ ID NO: 1215 - RNA, 19 nt, Artificial Sequence
  Description of Artificial Sequence: Synthetic oligonucleotide
uucuagaccuguuuugcuu

SEQ ID NO: 1216 - RNA, 19 nt, Artificial Sequence
  Description of Artificial Sequence: Synthetic oligonucleotide
aagcaaaacaggucuagaa

SEQ ID NO: 1217 - RNA, 19 nt, Artificial Sequence
  Description of Artificial Sequence: Synthetic oligonucleotide
aagcaaaacaggucuagaa

SEQ ID NO: 1218 - RNA, 19 nt, Artificial Sequence
  Description of Artificial Sequence: Synthetic oligonucleotide
aagcaaaacaggucuagaa

SEQ ID NO: 1219 - RNA, 19 nt, Artificial Sequence
  Description of Artificial Sequence: Synthetic oligonucleotide
aagcaaaacaggucuagaa

SEQ ID NO: 1220 - RNA, 19 nt, Artificial Sequence
  Description of Artificial Sequence: Synthetic oligonucleotide
aagcaaaacaggucuagaa

SEQ ID NO: 1221 - DNA, 21 bp, Artificial Sequence
  Description of Artificial Sequence: Synthetic oligonucleotide
  Description of Combined DNA/RNA Molecule: Synthetic oligonucleotide
acuacaucgaggaggacuctt

SEQ ID NO: 1222 - DNA, 21 bp, Artificial Sequence
  Description of Artificial Sequence: Synthetic oligonucleotide
  Description of Combined DNA/RNA Molecule: Synthetic oligonucleotide
uacaucgaggaggacuccutt

SEQ ID NO: 1223 - DNA, 21 bp, Artificial Sequence
  Description of Artificial Sequence: Synthetic oligonucleotide
  Description of Combined DNA/RNA Molecule: Synthetic oligonucleotide
acaucgaggaggacuccuctt

SEQ ID NO: 1224 - DNA, 21 bp, Artificial Sequence
  Description of Artificial Sequence: Synthetic oligonucleotide
  Description of Combined DNA/RNA Molecule: Synthetic oligonucleotide
caucgaggaggacuccucutt

SEQ ID NO: 1225 - DNA, 21 bp, Artificial Sequence
  Description of Artificial Sequence: Synthetic oligonucleotide
  Description of Combined DNA/RNA Molecule: Synthetic oligonucleotide
ucgaggaggacuccucugutt

SEQ ID NO: 1226 - DNA, 21 bp, Artificial Sequence
  Description of Artificial Sequence: Synthetic oligonucleotide
  Description of Combined DNA/RNA Molecule: Synthetic oligonucleotide
cgaggaggacuccucuguctt

SEQ ID NO: 1227 - DNA, 21 bp, Artificial Sequence
  Description of Artificial Sequence: Synthetic oligonucleotide
  Description of Combined DNA/RNA Molecule: Synthetic oligonucleotide
gaggaggacuccucugucutt

SEQ ID NO: 1228 - DNA, 21 bp, Artificial Sequence
  Description of Artificial Sequence: Synthetic oligonucleotide
  Description of Combined DNA/RNA Molecule: Synthetic oligonucleotide
aggaggacuccucugucuutt

SEQ ID NO: 1229 - DNA, 21 bp, Artificial Sequence
  Description of Artificial Sequence: Synthetic oligonucleotide
  Description of Combined DNA/RNA Molecule: Synthetic oligonucleotide
gcagccugguggagguguatt

SEQ ID NO: 1230 - DNA, 21 bp, Artificial Sequence
  Description of Artificial Sequence: Synthetic oligonucleotide
  Description of Combined DNA/RNA Molecule: Synthetic oligonucleotide
cagccugguggagguguautt

SEQ ID NO: 1231 - DNA, 21 bp, Artificial Sequence
  Description of Artificial Sequence: Synthetic oligonucleotide
  Description of Combined DNA/RNA Molecule: Synthetic oligonucleotide
agccugguggagguguauctt

SEQ ID NO: 1232 - DNA, 21 bp, Artificial Sequence
  Description of Artificial Sequence: Synthetic oligonucleotide
  Description of Combined DNA/RNA Molecule: Synthetic oligonucleotide
gccugguggagguguaucutt

SEQ ID NO: 1233 - DNA, 21 bp, Artificial Sequence
  Description of Artificial Sequence: Synthetic oligonucleotide
  Description of Combined DNA/RNA Molecule: Synthetic oligonucleotide
guggagguguaucuccuagtt

SEQ ID NO: 1234 - DNA, 21 bp, Artificial Sequence
  Description of Artificial Sequence: Synthetic oligonucleotide
  Description of Combined DNA/RNA Molecule: Synthetic oligonucleotide
uggagguguaucuccuagatt

SEQ ID NO: 1235 - DNA, 21 bp, Artificial Sequence
  Description of Artificial Sequence: Synthetic oligonucleotide
  Description of Combined DNA/RNA Molecule: Synthetic oligonucleotide
gagguguaucuccuagacatt

SEQ ID NO: 1236 - DNA, 21 bp, Artificial Sequence
  Description of Artificial Sequence: Synthetic oligonucleotide
  Description of Combined DNA/RNA Molecule: Synthetic oligonucleotide
guguaucuccuagacaccatt

SEQ ID NO: 1237 - DNA, 21 bp, Artificial Sequence
  Description of Artificial Sequence: Synthetic oligonucleotide
  Description of Combined DNA/RNA Molecule: Synthetic oligonucleotide
uaucuccuagacaccagcatt

SEQ ID NO: 1238 - DNA, 21 bp, Artificial Sequence
  Description of Artificial Sequence: Synthetic oligonucleotide
  Description of Combined DNA/RNA Molecule: Synthetic oligonucleotide
aucuccuagacaccagcautt

SEQ ID NO: 1239 - DNA, 21 bp, Artificial Sequence
  Description of Artificial Sequence: Synthetic oligonucleotide
  Description of Combined DNA/RNA Molecule: Synthetic oligonucleotide
cuagacaccagcauacagatt

SEQ ID NO: 1240 - DNA, 21 bp, Artificial Sequence
  Description of Artificial Sequence: Synthetic oligonucleotide
  Description of Combined DNA/RNA Molecule: Synthetic oligonucleotide
uagacaccagcauacagagtt

SEQ ID NO: 1241 - DNA, 21 bp, Artificial Sequence
  Description of Artificial Sequence: Synthetic oligonucleotide
  Description of Combined DNA/RNA Molecule: Synthetic oligonucleotide
agacaccagcauacagagutt

SEQ ID NO: 1242 - DNA, 21 bp, Artificial Sequence
  Description of Artificial Sequence: Synthetic oligonucleotide
  Description of Combined DNA/RNA Molecule: Synthetic oligonucleotide
acaccagcauacagagugatt

SEQ ID NO: 1243 - DNA, 21 bp, Artificial Sequence
  Description of Artificial Sequence: Synthetic oligonucleotide
  Description of Combined DNA/RNA Molecule: Synthetic oligonucleotide
caccagcauacagagugactt

SEQ ID NO: 1244 - DNA, 21 bp, Artificial Sequence
  Description of Artificial Sequence: Synthetic oligonucleotide
  Description of Combined DNA/RNA Molecule: Synthetic oligonucleotide
ccagcauacagagugaccatt

SEQ ID NO: 1245 - DNA, 21 bp, Artificial Sequence
  Description of Artificial Sequence: Synthetic oligonucleotide
  Description of Combined DNA/RNA Molecule: Synthetic oligonucleotide
cagcauacagagugaccactt

SEQ ID NO: 1246 - DNA, 21 bp, Artificial Sequence
  Description of Artificial Sequence: Synthetic oligonucleotide
  Description of Combined DNA/RNA Molecule: Synthetic oligonucleotide
uacagagugaccaccgggatt

SEQ ID NO: 1247 - DNA, 21 bp, Artificial Sequence
  Description of Artificial Sequence: Synthetic oligonucleotide
  Description of Combined DNA/RNA Molecule: Synthetic oligonucleotide
acagagugaccaccgggaatt

SEQ ID NO: 1248 - DNA, 21 bp, Artificial Sequence
  Description of Artificial Sequence: Synthetic oligonucleotide
  Description of Combined DNA/RNA Molecule: Synthetic oligonucleotide
cagagugaccaccgggaaatt

SEQ ID NO: 1249 - DNA, 21 bp, Artificial Sequence
  Description of Artificial Sequence: Synthetic oligonucleotide
  Description of Combined DNA/RNA Molecule: Synthetic oligonucleotide
ugaccaccgggaaaucgagtt

SEQ ID NO: 1250 - DNA, 21 bp, Artificial Sequence
  Description of Artificial Sequence: Synthetic oligonucleotide
  Description of Combined DNA/RNA Molecule: Synthetic oligonucleotide
caccgggaaaucgagggcatt

SEQ ID NO: 1251 - DNA, 21 bp, Artificial Sequence
  Description of Artificial Sequence: Synthetic oligonucleotide
  Description of Combined DNA/RNA Molecule: Synthetic oligonucleotide
accgggaaaucgagggcagtt

SEQ ID NO: 1252 - DNA, 21 bp, Artificial Sequence
  Description of Artificial Sequence: Synthetic oligonucleotide
  Description of Combined DNA/RNA Molecule: Synthetic oligonucleotide
gggaaaucgagggcagggutt

SEQ ID NO: 1253 - DNA, 21 bp, Artificial Sequence
  Description of Artificial Sequence: Synthetic oligonucleotide
  Description of Combined DNA/RNA Molecule: Synthetic oligonucleotide
ggaaaucgagggcaggguctt

SEQ ID NO: 1254 - DNA, 21 bp, Artificial Sequence
  Description of Artificial Sequence: Synthetic oligonucleotide
  Description of Combined DNA/RNA Molecule: Synthetic oligonucleotide
gaaaucgagggcagggucatt

SEQ ID NO: 1255 - DNA, 21 bp, Artificial Sequence
  Description of Artificial Sequence: Synthetic oligonucleotide
  Description of Combined DNA/RNA Molecule: Synthetic oligonucleotide
aaucgagggcagggucaugtt

SEQ ID NO: 1256 - DNA, 21 bp, Artificial Sequence
  Description of Artificial Sequence: Synthetic oligonucleotide
  Description of Combined DNA/RNA Molecule: Synthetic oligonucleotide
ucgagggcagggucauggutt

SEQ ID NO: 1257 - DNA, 21 bp, Artificial Sequence
  Description of Artificial Sequence: Synthetic oligonucleotide
  Description of Combined DNA/RNA Molecule: Synthetic oligonucleotide
agggcagggucauggucactt

SEQ ID NO: 1258 - DNA, 21 bp, Artificial Sequence
  Description of Artificial Sequence: Synthetic oligonucleotide
  Description of Combined DNA/RNA Molecule: Synthetic oligonucleotide
gcagggucauggucaccgatt

SEQ ID NO: 1259 - DNA, 21 bp, Artificial Sequence
  Description of Artificial Sequence: Synthetic oligonucleotide
  Description of Combined DNA/RNA Molecule: Synthetic oligonucleotide
gggucauggucaccgacuutt

SEQ ID NO: 1260 - DNA, 21 bp, Artificial Sequence
  Description of Artificial Sequence: Synthetic oligonucleotide
  Description of Combined DNA/RNA Molecule: Synthetic oligonucleotide
ggucauggucaccgacuuctt

SEQ ID NO: 1261 - DNA, 21 bp, Artificial Sequence
  Description of Artificial Sequence: Synthetic oligonucleotide
  Description of Combined DNA/RNA Molecule: Synthetic oligonucleotide
ucauggucaccgacuucgatt

SEQ ID NO: 1262 - DNA, 21 bp, Artificial Sequence
  Description of Artificial Sequence: Synthetic oligonucleotide
  Description of Combined DNA/RNA Molecule: Synthetic oligonucleotide
cauggucaccgacuucgagtt

SEQ ID NO: 1263 - DNA, 21 bp, Artificial Sequence
  Description of Artificial Sequence: Synthetic oligonucleotide
  Description of Combined DNA/RNA Molecule: Synthetic oligonucleotide
ggacccgcuuccacagacatt

SEQ ID NO: 1264 - DNA, 21 bp, Artificial Sequence
  Description of Artificial Sequence: Synthetic oligonucleotide
  Description of Combined DNA/RNA Molecule: Synthetic oligonucleotide
gacccgcuuccacagacagtt

SEQ ID NO: 1265 - DNA, 21 bp, Artificial Sequence
  Description of Artificial Sequence: Synthetic oligonucleotide
  Description of Combined DNA/RNA Molecule: Synthetic oligonucleotide
cgcuuccacagacaggccatt

SEQ ID NO: 1266 - DNA, 21 bp, Artificial Sequence
  Description of Artificial Sequence: Synthetic oligonucleotide
  Description of Combined DNA/RNA Molecule: Synthetic oligonucleotide
gcuuccacagacaggccagtt

SEQ ID NO: 1267 - DNA, 21 bp, Artificial Sequence
  Description of Artificial Sequence: Synthetic oligonucleotide
  Description of Combined DNA/RNA Molecule: Synthetic oligonucleotide
uuccacagacaggccagcatt

SEQ ID NO: 1268 - DNA, 21 bp, Artificial Sequence
  Description of Artificial Sequence: Synthetic oligonucleotide
  Description of Combined DNA/RNA Molecule: Synthetic oligonucleotide
uccacagacaggccagcaatt

SEQ ID NO: 1269 - DNA, 21 bp, Artificial Sequence
  Description of Artificial Sequence: Synthetic oligonucleotide
  Description of Combined DNA/RNA Molecule: Synthetic oligonucleotide
ccacagacaggccagcaagtt

SEQ ID NO: 1270 - DNA, 21 bp, Artificial Sequence
  Description of Artificial Sequence: Synthetic oligonucleotide
  Description of Combined DNA/RNA Molecule: Synthetic oligonucleotide
cacagacaggccagcaagutt

SEQ ID NO: 1271 - DNA, 21 bp, Artificial Sequence
  Description of Artificial Sequence: Synthetic oligonucleotide
  Description of Combined DNA/RNA Molecule: Synthetic oligonucleotide
acagacaggccagcaagugtt

SEQ ID NO: 1272 - DNA, 21 bp, Artificial Sequence
  Description of Artificial Sequence: Synthetic oligonucleotide
  Description of Combined DNA/RNA Molecule: Synthetic oligonucleotide
cagacaggccagcaagugutt

SEQ ID NO: 1273 - DNA, 21 bp, Artificial Sequence
  Description of Artificial Sequence: Synthetic oligonucleotide
  Description of Combined DNA/RNA Molecule: Synthetic oligonucleotide
agacaggccagcaagugugtt

SEQ ID NO: 1274 - DNA, 21 bp, Artificial Sequence
  Description of Artificial Sequence: Synthetic oligonucleotide
  Description of Combined DNA/RNA Molecule: Synthetic oligonucleotide
gacaggccagcaagugugatt

SEQ ID NO: 1275 - DNA, 21 bp, Artificial Sequence
  Description of Artificial Sequence: Synthetic oligonucleotide
  Description of Combined DNA/RNA Molecule: Synthetic oligonucleotide
acaggccagcaagugugactt

SEQ ID NO: 1276 - DNA, 21 bp, Artificial Sequence
  Description of Artificial Sequence: Synthetic oligonucleotide
  Description of Combined DNA/RNA Molecule: Synthetic oligonucleotide
caggccagcaagugugacatt

SEQ ID NO: 1277 - DNA, 21 bp, Artificial Sequence
  Description of Artificial Sequence: Synthetic oligonucleotide
  Description of Combined DNA/RNA Molecule: Synthetic oligonucleotide
aggccagcaagugugacagtt

SEQ ID NO: 1278 - DNA, 21 bp, Artificial Sequence
  Description of Artificial Sequence: Synthetic oligonucleotide
  Description of Combined DNA/RNA Molecule: Synthetic oligonucleotide
agccugcgcgugcucaacutt

SEQ ID NO: 1279 - DNA, 21 bp, Artificial Sequence
  Description of Artificial Sequence: Synthetic oligonucleotide
  Description of Combined DNA/RNA Molecule: Synthetic oligonucleotide
gcgcgugcucaacugccaatt

SEQ ID NO: 1280 - DNA, 21 bp, Artificial Sequence
  Description of Artificial Sequence: Synthetic oligonucleotide
  Description of Combined DNA/RNA Molecule: Synthetic oligonucleotide
gugcucaacugccaagggatt

SEQ ID NO: 1281 - DNA, 21 bp, Artificial Sequence
  Description of Artificial Sequence: Synthetic oligonucleotide
  Description of Combined DNA/RNA Molecule: Synthetic oligonucleotide
ugcucaacugccaagggaatt

SEQ ID NO: 1282 - DNA, 21 bp, Artificial Sequence
  Description of Artificial Sequence: Synthetic oligonucleotide
  Description of Combined DNA/RNA Molecule: Synthetic oligonucleotide
gcucaacugccaagggaagtt

SEQ ID NO: 1283 - DNA, 21 bp, Artificial Sequence
  Description of Artificial Sequence: Synthetic oligonucleotide
  Description of Combined DNA/RNA Molecule: Synthetic oligonucleotide
aacugccaagggaagggcatt

SEQ ID NO: 1284 - DNA, 21 bp, Artificial Sequence
  Description of Artificial Sequence: Synthetic oligonucleotide
  Description of Combined DNA/RNA Molecule: Synthetic oligonucleotide
acugccaagggaagggcactt

SEQ ID NO: 1285 - DNA, 21 bp, Artificial Sequence
  Description of Artificial Sequence: Synthetic oligonucleotide
  Description of Combined DNA/RNA Molecule: Synthetic oligonucleotide
cacccucauaggccuggagtt

SEQ ID NO: 1286 - DNA, 21 bp, Artificial Sequence
  Description of Artificial Sequence: Synthetic oligonucleotide
  Description of Combined DNA/RNA Molecule: Synthetic oligonucleotide
acccucauaggccuggagutt

SEQ ID NO: 1287 - DNA, 21 bp, Artificial Sequence
  Description of Artificial Sequence: Synthetic oligonucleotide
  Description of Combined DNA/RNA Molecule: Synthetic oligonucleotide
cccucauaggccuggaguutt

SEQ ID NO: 1288 - DNA, 21 bp, Artificial Sequence
  Description of Artificial Sequence: Synthetic oligonucleotide
  Description of Combined DNA/RNA Molecule: Synthetic oligonucleotide
ccucauaggccuggaguuutt

SEQ ID NO: 1289 - DNA, 21 bp, Artificial Sequence
  Description of Artificial Sequence: Synthetic oligonucleotide
  Description of Combined DNA/RNA Molecule: Synthetic oligonucleotide
cucauaggccuggaguuuatt

SEQ ID NO: 1290 - DNA, 21 bp, Artificial Sequence
  Description of Artificial Sequence: Synthetic oligonucleotide
  Description of Combined DNA/RNA Molecule: Synthetic oligonucleotide
ccuggaguuuauucggaaatt

SEQ ID NO: 1291 - DNA, 21 bp, Artificial Sequence
  Description of Artificial Sequence: Synthetic oligonucleotide
  Description of Combined DNA/RNA Molecule: Synthetic oligonucleotide
uggaguuuauucggaaaagtt

SEQ ID NO: 1292 - DNA, 21 bp, Artificial Sequence
  Description of Artificial Sequence: Synthetic oligonucleotide
  Description of Combined DNA/RNA Molecule: Synthetic oligonucleotide
aguuuauucggaaaagccatt

SEQ ID NO: 1293 - DNA, 21 bp, Artificial Sequence
  Description of Artificial Sequence: Synthetic oligonucleotide
  Description of Combined DNA/RNA Molecule: Synthetic oligonucleotide
guuuauucggaaaagccagtt

SEQ ID NO: 1294 - DNA, 21 bp, Artificial Sequence
  Description of Artificial Sequence: Synthetic oligonucleotide
  Description of Combined DNA/RNA Molecule: Synthetic oligonucleotide
uauucggaaaagccagcugtt

SEQ ID NO: 1295 - DNA, 21 bp, Artificial Sequence
  Description of Artificial Sequence: Synthetic oligonucleotide
  Description of Combined DNA/RNA Molecule: Synthetic oligonucleotide
uucggaaaagccagcuggutt

SEQ ID NO: 1296 - DNA, 21 bp, Artificial Sequence
  Description of Artificial Sequence: Synthetic oligonucleotide
  Description of Combined DNA/RNA Molecule: Synthetic oligonucleotide
ucggaaaagccagcugguctt

SEQ ID NO: 1297 - DNA, 21 bp, Artificial Sequence
  Description of Artificial Sequence: Synthetic oligonucleotide
  Description of Combined DNA/RNA Molecule: Synthetic oligonucleotide
ggaaaagccagcugguccatt

SEQ ID NO: 1298 - DNA, 21 bp, Artificial Sequence
  Description of Artificial Sequence: Synthetic oligonucleotide
  Description of Combined DNA/RNA Molecule: Synthetic oligonucleotide
gaaaagccagcugguccagtt

SEQ ID NO: 1299 - DNA, 21 bp, Artificial Sequence
  Description of Artificial Sequence: Synthetic oligonucleotide
  Description of Combined DNA/RNA Molecule: Synthetic oligonucleotide
ucaccgcugccggcaacuutt

SEQ ID NO: 1300 - DNA, 21 bp, Artificial Sequence
  Description of Artificial Sequence: Synthetic oligonucleotide
  Description of Combined DNA/RNA Molecule: Synthetic oligonucleotide
aacuuccgggacgaugccutt

SEQ ID NO: 1301 - DNA, 21 bp, Artificial Sequence
  Description of Artificial Sequence: Synthetic oligonucleotide
  Description of Combined DNA/RNA Molecule: Synthetic oligonucleotide
acuuccgggacgaugccugtt

SEQ ID NO: 1302 - DNA, 21 bp, Artificial Sequence
  Description of Artificial Sequence: Synthetic oligonucleotide
  Description of Combined DNA/RNA Molecule: Synthetic oligonucleotide
gggacgaugccugccucuatt

SEQ ID NO: 1303 - DNA, 21 bp, Artificial Sequence
  Description of Artificial Sequence: Synthetic oligonucleotide
  Description of Combined DNA/RNA Molecule: Synthetic oligonucleotide
gacgaugccugccucuacutt

SEQ ID NO: 1304 - DNA, 21 bp, Artificial Sequence
  Description of Artificial Sequence: Synthetic oligonucleotide
  Description of Combined DNA/RNA Molecule: Synthetic oligonucleotide
acgaugccugccucuacuctt

SEQ ID NO: 1305 - DNA, 21 bp, Artificial Sequence
  Description of Artificial Sequence: Synthetic oligonucleotide
  Description of Combined DNA/RNA Molecule: Synthetic oligonucleotide
cccgaggucaucacaguugtt

SEQ ID NO: 1306 - DNA, 21 bp, Artificial Sequence
  Description of Artificial Sequence: Synthetic oligonucleotide
  Description of Combined DNA/RNA Molecule: Synthetic oligonucleotide
gucaucacaguuggggccatt

SEQ ID NO: 1307 - DNA, 21 bp, Artificial Sequence
  Description of Artificial Sequence: Synthetic oligonucleotide
  Description of Combined DNA/RNA Molecule: Synthetic oligonucleotide
ucaucacaguuggggccactt

SEQ ID NO: 1308 - DNA, 21 bp, Artificial Sequence
  Description of Artificial Sequence: Synthetic oligonucleotide
  Description of Combined DNA/RNA Molecule: Synthetic oligonucleotide
aucacaguuggggccaccatt

SEQ ID NO: 1309 - DNA, 21 bp, Artificial Sequence
  Description of Artificial Sequence: Synthetic oligonucleotide
  Description of Combined DNA/RNA Molecule: Synthetic oligonucleotide
ucacaguuggggccaccaatt

SEQ ID NO: 1310 - DNA, 21 bp, Artificial Sequence
  Description of Artificial Sequence: Synthetic oligonucleotide
  Description of Combined DNA/RNA Molecule: Synthetic oligonucleotide
cacaguuggggccaccaautt

SEQ ID NO: 1311 - DNA, 21 bp, Artificial Sequence
  Description of Artificial Sequence: Synthetic oligonucleotide
  Description of Combined DNA/RNA Molecule: Synthetic oligonucleotide
acaguuggggccaccaaugtt

SEQ ID NO: 1312 - DNA, 21 bp, Artificial Sequence
  Description of Artificial Sequence: Synthetic oligonucleotide
  Description of Combined DNA/RNA Molecule: Synthetic oligonucleotide
uuggggccaccaaugcccatt

SEQ ID NO: 1313 - DNA, 21 bp, Artificial Sequence
  Description of Artificial Sequence: Synthetic oligonucleotide
  Description of Combined DNA/RNA Molecule: Synthetic oligonucleotide
cggugacccuggggacuuutt

SEQ ID NO: 1314 - DNA, 21 bp, Artificial Sequence
  Description of Artificial Sequence: Synthetic oligonucleotide
  Description of Combined DNA/RNA Molecule: Synthetic oligonucleotide
ggugacccuggggacuuugtt

SEQ ID NO: 1315 - DNA, 21 bp, Artificial Sequence
  Description of Artificial Sequence: Synthetic oligonucleotide
  Description of Combined DNA/RNA Molecule: Synthetic oligonucleotide
gggacuuuggggaccaacutt

SEQ ID NO: 1316 - DNA, 21 bp, Artificial Sequence
  Description of Artificial Sequence: Synthetic oligonucleotide
  Description of Combined DNA/RNA Molecule: Synthetic oligonucleotide
ggacuuuggggaccaacuutt

SEQ ID NO: 1317 - DNA, 21 bp, Artificial Sequence
  Description of Artificial Sequence: Synthetic oligonucleotide
  Description of Combined DNA/RNA Molecule: Synthetic oligonucleotide
ugaaggaggagacccaccutt

SEQ ID NO: 1318 - DNA, 21 bp, Artificial Sequence
  Description of Artificial Sequence: Synthetic oligonucleotide
  Description of Combined DNA/RNA Molecule: Synthetic oligonucleotide
gccuucuuccuggcuuccutt

SEQ ID NO: 1319 - DNA, 21 bp, Artificial Sequence
  Description of Artificial Sequence: Synthetic oligonucleotide
  Description of Combined DNA/RNA Molecule: Synthetic oligonucleotide
ggaggacuccucugucuuutt

SEQ ID NO: 1320 - DNA, 21 bp, Artificial Sequence
  Description of Artificial Sequence: Synthetic oligonucleotide
  Description of Combined DNA/RNA Molecule: Synthetic oligonucleotide
uggucaccgacuucgagaatt

SEQ ID NO: 1321 - DNA, 21 bp, Artificial Sequence
  Description of Artificial Sequence: Synthetic oligonucleotide
  Description of Combined DNA/RNA Molecule: Synthetic oligonucleotide
ggccagcaagugugacagutt

SEQ ID NO: 1322 - DNA, 21 bp, Artificial Sequence
  Description of Artificial Sequence: Synthetic oligonucleotide
  Description of Combined DNA/RNA Molecule: Synthetic oligonucleotide
ucauggcacccaccuggcatt

SEQ ID NO: 1323 - DNA, 21 bp, Artificial Sequence
  Description of Artificial Sequence: Synthetic oligonucleotide
  Description of Combined DNA/RNA Molecule: Synthetic oligonucleotide
aagccagcugguccagccutt

SEQ ID NO: 1324 - DNA, 21 bp, Artificial Sequence
  Description of Artificial Sequence: Synthetic oligonucleotide
  Description of Combined DNA/RNA Molecule: Synthetic oligonucleotide
agcucccgaggucaucacatt

SEQ ID NO: 1325 - DNA, 21 bp, Artificial Sequence
  Description of Artificial Sequence: Synthetic oligonucleotide
  Description of Combined DNA/RNA Molecule: Synthetic oligonucleotide
uggggccaccaaugcccaatt

SEQ ID NO: 1326 - DNA, 21 bp, Artificial Sequence
  Description of Artificial Sequence: Synthetic oligonucleotide
  Description of Combined DNA/RNA Molecule: Synthetic oligonucleotide
aagaccagccggugacccutt

SEQ ID NO: 1327 - DNA, 21 bp, Artificial Sequence
  Description of Artificial Sequence: Synthetic oligonucleotide
  Description of Combined DNA/RNA Molecule: Synthetic oligonucleotide
gcaccugcuuugugucacatt

SEQ ID NO: 1328 - DNA, 21 bp, Artificial Sequence
  Description of Artificial Sequence: Synthetic oligonucleotide
  Description of Combined DNA/RNA Molecule: Synthetic oligonucleotide
gcuguuuugcaggacuguatt

SEQ ID NO: 1329 - DNA, 21 bp, Artificial Sequence
  Description of Artificial Sequence: Synthetic oligonucleotide
  Description of Combined DNA/RNA Molecule: Synthetic oligonucleotide
gccuacacggauggccacatt

SEQ ID NO: 1330 - DNA, 21 bp, Artificial Sequence
  Description of Artificial Sequence: Synthetic oligonucleotide
  Description of Combined DNA/RNA Molecule: Synthetic oligonucleotide
gccaacugcagcguccacatt

SEQ ID NO: 1331 - DNA, 21 bp, Artificial Sequence
  Description of Artificial Sequence: Synthetic oligonucleotide
  Description of Combined DNA/RNA Molecule: Synthetic oligonucleotide
acacagcuccaccagcugatt

SEQ ID NO: 1332 - DNA, 21 bp, Artificial Sequence
  Description of Artificial Sequence: Synthetic oligonucleotide
  Description of Combined DNA/RNA Molecule: Synthetic oligonucleotide
acagggccacguccucacatt

SEQ ID NO: 1333 - DNA, 21 bp, Artificial Sequence
  Description of Artificial Sequence: Synthetic oligonucleotide
  Description of Combined DNA/RNA Molecule: Synthetic oligonucleotide
uagucaggagccgggacgutt

SEQ ID NO: 1334 - DNA, 21 bp, Artificial Sequence
  Description of Artificial Sequence: Synthetic oligonucleotide
  Description of Combined DNA/RNA Molecule: Synthetic oligonucleotide
uacaggcagcaccagcgaatt

SEQ ID NO: 1335 - DNA, 21 bp, Artificial Sequence
  Description of Artificial Sequence: Synthetic oligonucleotide
  Description of Combined DNA/RNA Molecule: Synthetic oligonucleotide
acagccguugccaucugcutt

SEQ ID NO: 1336 - DNA, 21 bp, Artificial Sequence
  Description of Artificial Sequence: Synthetic oligonucleotide
  Description of Combined DNA/RNA Molecule: Synthetic oligonucleotide
aagggcuggggcugagcuutt

SEQ ID NO: 1337 - DNA, 21 bp, Artificial Sequence
  Description of Artificial Sequence: Synthetic oligonucleotide
  Description of Combined DNA/RNA Molecule: Synthetic oligonucleotide
agggcuggggcugagcuuutt

SEQ ID NO: 1338 - DNA, 21 bp, Artificial Sequence
  Description of Artificial Sequence: Synthetic oligonucleotide
  Description of Combined DNA/RNA Molecule: Synthetic oligonucleotide
ucucagcccuccauggccutt

SEQ ID NO: 1339 - DNA, 21 bp, Artificial Sequence
  Description of Artificial Sequence: Synthetic oligonucleotide
  Description of Combined DNA/RNA Molecule: Synthetic oligonucleotide
gcugccagcugcucccaautt

SEQ ID NO: 1340 - DNA, 21 bp, Artificial Sequence
  Description of Artificial Sequence: Synthetic oligonucleotide
  Description of Combined DNA/RNA Molecule: Synthetic oligonucleotide
ggucuccaccaaggaggcatt

SEQ ID NO: 1341 - DNA, 21 bp, Artificial Sequence
  Description of Artificial Sequence: Synthetic oligonucleotide
  Description of Combined DNA/RNA Molecule: Synthetic oligonucleotide
gcaggauucuucccauggatt

SEQ ID NO: 1342 - DNA, 21 bp, Artificial Sequence
  Description of Artificial Sequence: Synthetic oligonucleotide
  Description of Combined DNA/RNA Molecule: Synthetic oligonucleotide
gugcugauggcccucaucutt

SEQ ID NO: 1343 - DNA, 21 bp, Artificial Sequence
  Description of Artificial Sequence: Synthetic oligonucleotide
  Description of Combined DNA/RNA Molecule: Synthetic oligonucleotide
uggcccucaucuccagcuatt

SEQ ID NO: 1344 - DNA, 21 bp, Artificial Sequence
  Description of Artificial Sequence: Synthetic oligonucleotide
  Description of Combined DNA/RNA Molecule: Synthetic oligonucleotide
uuagcuuucuggauggcautt

SEQ ID NO: 1345 - DNA, 21 bp, Artificial Sequence
  Description of Artificial Sequence: Synthetic oligonucleotide
  Description of Combined DNA/RNA Molecule: Synthetic oligonucleotide
cugcucuaugccaggcugutt

SEQ ID NO: 1346 - DNA, 21 bp, Artificial Sequence
  Description of Artificial Sequence: Synthetic oligonucleotide
  Description of Combined DNA/RNA Molecule: Synthetic oligonucleotide
gcucugaagccaagccucutt

SEQ ID NO: 1347 - DNA, 21 bp, Artificial Sequence
  Description of Artificial Sequence: Synthetic oligonucleotide
  Description of Combined DNA/RNA Molecule: Synthetic oligonucleotide
gaacgaugccugcaggcautt

SEQ ID NO: 1348 - DNA, 21 bp, Artificial Sequence
  Description of Artificial Sequence: Synthetic oligonucleotide
  Description of Combined DNA/RNA Molecule: Synthetic oligonucleotide
aacaacugucccuccuugatt

SEQ ID NO: 1349 - DNA, 21 bp, Artificial Sequence
  Description of Artificial Sequence: Synthetic oligonucleotide
  Description of Combined DNA/RNA Molecule: Synthetic oligonucleotide
guugccuuuuuacagccaatt

SEQ ID NO: 1350 - RNA, 21 nt, Artificial Sequence
  Description of Artificial Sequence: Synthetic oligonucleotide
uucuagaccuguuuugcuuuu

SEQ ID NO: 1351 - RNA, 21 nt, Artificial Sequence
  Description of Artificial Sequence: Synthetic oligonucleotide
uucuagaccuguuuugcuuuu

SEQ ID NO: 1352 - RNA, 21 nt, Artificial Sequence
  Description of Artificial Sequence: Synthetic oligonucleotide
uucuagaccuguuuugcuuuu

SEQ ID NO: 1353 - RNA, 21 nt, Artificial Sequence
  Description of Artificial Sequence: Synthetic oligonucleotide
uucuagaccuguuuugcuuuu

SEQ ID NO: 1354 - RNA, 21 nt, Artificial Sequence
  Description of Artificial Sequence: Synthetic oligonucleotide
uucuagaccuguuuugcuuuu

SEQ ID NO: 1355 - RNA, 21 nt, Artificial Sequence
  Description of Artificial Sequence: Synthetic oligonucleotide
uucuagaccuguuuugcuuuu

SEQ ID NO: 1356 - RNA, 21 nt, Artificial Sequence
  Description of Artificial Sequence: Synthetic oligonucleotide
uucuagaccuguuuugcuuuu

SEQ ID NO: 1357 - DNA, 21 bp, Artificial Sequence
  Description of Artificial Sequence: Synthetic oligonucleotide
  Description of Combined DNA/RNA Molecule: Synthetic oligonucleotide
uucuagaccuguuuugcuutt

SEQ ID NO: 1358 - DNA, 21 bp, Artificial Sequence
  Description of Artificial Sequence: Synthetic oligonucleotide
  Description of Combined DNA/RNA Molecule: Synthetic oligonucleotide
ucagcuccugcacaguccutt

SEQ ID NO: 1359 - DNA, 21 bp, Artificial Sequence
  Description of Artificial Sequence: Synthetic oligonucleotide
  Description of Combined DNA/RNA Molecule: Synthetic oligonucleotide
ccaagggaagggcacgguutt

SEQ ID NO: 1360 - DNA, 21 bp, Artificial Sequence
  Description of Artificial Sequence: Synthetic oligonucleotide
  Description of Combined DNA/RNA Molecule: Synthetic oligonucleotide
cuggcaccuacgugguggutt

SEQ ID NO: 1361 - DNA, 21 bp, Artificial Sequence
  Description of Artificial Sequence: Synthetic oligonucleotide
  Description of Combined DNA/RNA Molecule: Synthetic oligonucleotide
uccuagaccuguuuugcuutt

SEQ ID NO: 1362 - DNA, 21 bp, Artificial Sequence
  Description of Artificial Sequence: Synthetic oligonucleotide
  Description of Combined DNA/RNA Molecule: Synthetic oligonucleotide
uucuagaccuguuuugcuutt

SEQ ID NO: 1363 - DNA, 21 bp, Artificial Sequence
  Description of Artificial Sequence: Synthetic oligonucleotide
  Description of Combined DNA/RNA Molecule: Synthetic oligonucleotide
uucuagaccuguuuugcuutt

SEQ ID NO: 1364 - DNA, 21 bp, Artificial Sequence
  Description of Artificial Sequence: Synthetic oligonucleotide
  Description of Combined DNA/RNA Molecule: Synthetic oligonucleotide
uucuagaccuguuuugcuutt

SEQ ID NO: 1365 - DNA, 21 bp, Artificial Sequence
  Description of Artificial Sequence: Synthetic oligonucleotide
  Description of Combined DNA/RNA Molecule: Synthetic oligonucleotide
uucuagaccuguuuugcuutt

SEQ ID NO: 1366 - DNA, 21 bp, Artificial Sequence
  Description of Artificial Sequence: Synthetic oligonucleotide
  Description of Combined DNA/RNA Molecule: Synthetic oligonucleotide
uucuagaccuguuuugcuutt

SEQ ID NO: 1367 - DNA, 21 bp, Artificial Sequence
  Description of Artificial Sequence: Synthetic oligonucleotide
  Description of Combined DNA/RNA Molecule: Synthetic oligonucleotide
uucuagaccuguuuugcuutt

SEQ ID NO: 1368 - DNA, 21 bp, Artificial Sequence
  Description of Artificial Sequence: Synthetic oligonucleotide
  Description of Combined DNA/RNA Molecule: Synthetic oligonucleotide
uucuagaccuguuuugcuutt

SEQ ID NO: 1369 - DNA, 21 bp, Artificial Sequence
  Description of Artificial Sequence: Synthetic oligonucleotide
  Description of Combined DNA/RNA Molecule: Synthetic oligonucleotide
uucuagaccuguuuugcuutt

SEQ ID NO: 1370 - DNA, 21 bp, Artificial Sequence
  Description of Artificial Sequence: Synthetic oligonucleotide
  Description of Combined DNA/RNA Molecule: Synthetic oligonucleotide
uucuagaccuguuuugcuutt

SEQ ID NO: 1371 - DNA, 21 bp, Artificial Sequence
  Description of Artificial Sequence: Synthetic oligonucleotide
  Description of Combined DNA/RNA Molecule: Synthetic oligonucleotide
uucuagaccuguuuugcuutt

SEQ ID NO: 1372 - DNA, 21 bp, Artificial Sequence
  Description of Artificial Sequence: Synthetic oligonucleotide
  Description of Combined DNA/RNA Molecule: Synthetic oligonucleotide
uucuagaccuguuuugcuutt

SEQ ID NO: 1373 - DNA, 21 bp, Artificial Sequence
  Description of Artificial Sequence: Synthetic oligonucleotide
  Description of Combined DNA/RNA Molecule: Synthetic oligonucleotide
uucuagaccuguuuugcuutt

SEQ ID NO: 1374 - DNA, 21 bp, Artificial Sequence
  Description of Artificial Sequence: Synthetic oligonucleotide
  Description of Combined DNA/RNA Molecule: Synthetic oligonucleotide
gacuuuggggaccaacuuutt

SEQ ID NO: 1375 - DNA, 21 bp, Artificial Sequence
  Description of Artificial Sequence: Synthetic oligonucleotide
  Description of Combined DNA/RNA Molecule: Synthetic oligonucleotide
acuuuggggaccaacuuugtt

SEQ ID NO: 1376 - DNA, 21 bp, Artificial Sequence
  Description of Artificial Sequence: Synthetic oligonucleotide
  Description of Combined DNA/RNA Molecule: Synthetic oligonucleotide
gggaccaacuuuggccgcutt

SEQ ID NO: 1377 - DNA, 21 bp, Artificial Sequence
  Description of Artificial Sequence: Synthetic oligonucleotide
  Description of Combined DNA/RNA Molecule: Synthetic oligonucleotide
ggaccaacuuuggccgcugtt

SEQ ID NO: 1378 - DNA, 21 bp, Artificial Sequence
  Description of Artificial Sequence: Synthetic oligonucleotide
  Description of Combined DNA/RNA Molecule: Synthetic oligonucleotide
gaccaacuuuggccgcugutt

SEQ ID NO: 1379 - DNA, 21 bp, Artificial Sequence
  Description of Artificial Sequence: Synthetic oligonucleotide
  Description of Combined DNA/RNA Molecule: Synthetic oligonucleotide
ccaacuuuggccgcugugutt

SEQ ID NO: 1380 - DNA, 21 bp, Artificial Sequence
  Description of Artificial Sequence: Synthetic oligonucleotide
  Description of Combined DNA/RNA Molecule: Synthetic oligonucleotide
acuuuggccgcuguguggatt

SEQ ID NO: 1381 - DNA, 21 bp, Artificial Sequence
  Description of Artificial Sequence: Synthetic oligonucleotide
  Description of Combined DNA/RNA Molecule: Synthetic oligonucleotide
cuuuggccgcuguguggactt

SEQ ID NO: 1382 - DNA, 21 bp, Artificial Sequence
  Description of Artificial Sequence: Synthetic oligonucleotide
  Description of Combined DNA/RNA Molecule: Synthetic oligonucleotide
uuggccgcuguguggaccutt

SEQ ID NO: 1383 - DNA, 21 bp, Artificial Sequence
  Description of Artificial Sequence: Synthetic oligonucleotide
  Description of Combined DNA/RNA Molecule: Synthetic oligonucleotide
gccgcuguguggaccucuutt

SEQ ID NO: 1384 - DNA, 21 bp, Artificial Sequence
  Description of Artificial Sequence: Synthetic oligonucleotide
  Description of Combined DNA/RNA Molecule: Synthetic oligonucleotide
ccgcuguguggaccucuuutt

SEQ ID NO: 1385 - DNA, 21 bp, Artificial Sequence
  Description of Artificial Sequence: Synthetic oligonucleotide
  Description of Combined DNA/RNA Molecule: Synthetic oligonucleotide
uguggaccucuuugccccatt

SEQ ID NO: 1386 - DNA, 21 bp, Artificial Sequence
  Description of Artificial Sequence: Synthetic oligonucleotide
  Description of Combined DNA/RNA Molecule: Synthetic oligonucleotide
guggaccucuuugccccagtt

SEQ ID NO: 1387 - DNA, 21 bp, Artificial Sequence
  Description of Artificial Sequence: Synthetic oligonucleotide
  Description of Combined DNA/RNA Molecule: Synthetic oligonucleotide
cccaggggaggacaucauutt

SEQ ID NO: 1388 - DNA, 21 bp, Artificial Sequence
  Description of Artificial Sequence: Synthetic oligonucleotide
  Description of Combined DNA/RNA Molecule: Synthetic oligonucleotide
ccaggggaggacaucauugtt

SEQ ID NO: 1389 - DNA, 21 bp, Artificial Sequence
  Description of Artificial Sequence: Synthetic oligonucleotide
  Description of Combined DNA/RNA Molecule: Synthetic oligonucleotide
aggggaggacaucauuggutt

SEQ ID NO: 1390 - DNA, 21 bp, Artificial Sequence
  Description of Artificial Sequence: Synthetic oligonucleotide
  Description of Combined DNA/RNA Molecule: Synthetic oligonucleotide
ggggaggacaucauuggugtt

SEQ ID NO: 1391 - DNA, 21 bp, Artificial Sequence
  Description of Artificial Sequence: Synthetic oligonucleotide
  Description of Combined DNA/RNA Molecule: Synthetic oligonucleotide
gaggacaucauuggugccutt

SEQ ID NO: 1392 - DNA, 21 bp, Artificial Sequence
  Description of Artificial Sequence: Synthetic oligonucleotide
  Description of Combined DNA/RNA Molecule: Synthetic oligonucleotide
aggacaucauuggugccuctt

SEQ ID NO: 1393 - DNA, 21 bp, Artificial Sequence
  Description of Artificial Sequence: Synthetic oligonucleotide
  Description of Combined DNA/RNA Molecule: Synthetic oligonucleotide
acaucauuggugccuccagtt

SEQ ID NO: 1394 - DNA, 21 bp, Artificial Sequence
  Description of Artificial Sequence: Synthetic oligonucleotide
  Description of Combined DNA/RNA Molecule: Synthetic oligonucleotide
cauuggugccuccagcgactt

SEQ ID NO: 1395 - DNA, 21 bp, Artificial Sequence
  Description of Artificial Sequence: Synthetic oligonucleotide
  Description of Combined DNA/RNA Molecule: Synthetic oligonucleotide
auuggugccuccagcgacutt

SEQ ID NO: 1396 - DNA, 21 bp, Artificial Sequence
  Description of Artificial Sequence: Synthetic oligonucleotide
  Description of Combined DNA/RNA Molecule: Synthetic oligonucleotide
uuggugccuccagcgacugtt

SEQ ID NO: 1397 - DNA, 21 bp, Artificial Sequence
  Description of Artificial Sequence: Synthetic oligonucleotide
  Description of Combined DNA/RNA Molecule: Synthetic oligonucleotide
uccagcgacugcagcaccutt

SEQ ID NO: 1398 - DNA, 21 bp, Artificial Sequence
  Description of Artificial Sequence: Synthetic oligonucleotide
  Description of Combined DNA/RNA Molecule: Synthetic oligonucleotide
agcgacugcagcaccugcutt

SEQ ID NO: 1399 - DNA, 21 bp, Artificial Sequence
  Description of Artificial Sequence: Synthetic oligonucleotide
  Description of Combined DNA/RNA Molecule: Synthetic oligonucleotide
gcgacugcagcaccugcuutt

SEQ ID NO: 1400 - DNA, 21 bp, Artificial Sequence
  Description of Artificial Sequence: Synthetic oligonucleotide
  Description of Combined DNA/RNA Molecule: Synthetic oligonucleotide
cgacugcagcaccugcuuutt

SEQ ID NO: 1401 - DNA, 21 bp, Artificial Sequence
  Description of Artificial Sequence: Synthetic oligonucleotide
  Description of Combined DNA/RNA Molecule: Synthetic oligonucleotide
gacugcagcaccugcuuugtt

SEQ ID NO: 1402 - DNA, 21 bp, Artificial Sequence
  Description of Artificial Sequence: Synthetic oligonucleotide
  Description of Combined DNA/RNA Molecule: Synthetic oligonucleotide
acugcagcaccugcuuugutt

SEQ ID NO: 1403 - DNA, 21 bp, Artificial Sequence
  Description of Artificial Sequence: Synthetic oligonucleotide
  Description of Combined DNA/RNA Molecule: Synthetic oligonucleotide
cugcagcaccugcuuugugtt

SEQ ID NO: 1404 - DNA, 21 bp, Artificial Sequence
  Description of Artificial Sequence: Synthetic oligonucleotide
  Description of Combined DNA/RNA Molecule: Synthetic oligonucleotide
ugcagcaccugcuuugugutt

SEQ ID NO: 1405 - DNA, 21 bp, Artificial Sequence
  Description of Artificial Sequence: Synthetic oligonucleotide
  Description of Combined DNA/RNA Molecule: Synthetic oligonucleotide
gcagcaccugcuuuguguctt

SEQ ID NO: 1406 - DNA, 21 bp, Artificial Sequence
  Description of Artificial Sequence: Synthetic oligonucleotide
  Description of Combined DNA/RNA Molecule: Synthetic oligonucleotide
cagcaccugcuuugugucatt

SEQ ID NO: 1407 - DNA, 21 bp, Artificial Sequence
  Description of Artificial Sequence: Synthetic oligonucleotide
  Description of Combined DNA/RNA Molecule: Synthetic oligonucleotide
ugcccacguggcuggcauutt

SEQ ID NO: 1408 - DNA, 21 bp, Artificial Sequence
  Description of Artificial Sequence: Synthetic oligonucleotide
  Description of Combined DNA/RNA Molecule: Synthetic oligonucleotide
ccacguggcuggcauugcatt

SEQ ID NO: 1409 - DNA, 21 bp, Artificial Sequence
  Description of Artificial Sequence: Synthetic oligonucleotide
  Description of Combined DNA/RNA Molecule: Synthetic oligonucleotide
cacguggcuggcauugcagtt

SEQ ID NO: 1410 - DNA, 21 bp, Artificial Sequence
  Description of Artificial Sequence: Synthetic oligonucleotide
  Description of Combined DNA/RNA Molecule: Synthetic oligonucleotide
guggcuggcauugcagccatt

SEQ ID NO: 1411 - DNA, 21 bp, Artificial Sequence
  Description of Artificial Sequence: Synthetic oligonucleotide
  Description of Combined DNA/RNA Molecule: Synthetic oligonucleotide
uggcuggcauugcagccautt

SEQ ID NO: 1412 - DNA, 21 bp, Artificial Sequence
  Description of Artificial Sequence: Synthetic oligonucleotide
  Description of Combined DNA/RNA Molecule: Synthetic oligonucleotide
ggcuggcauugcagccaugtt

SEQ ID NO: 1413 - DNA, 21 bp, Artificial Sequence
  Description of Artificial Sequence: Synthetic oligonucleotide
  Description of Combined DNA/RNA Molecule: Synthetic oligonucleotide
gcuggcauugcagccaugatt

SEQ ID NO: 1414 - DNA, 21 bp, Artificial Sequence
  Description of Artificial Sequence: Synthetic oligonucleotide
  Description of Combined DNA/RNA Molecule: Synthetic oligonucleotide
cuggcauugcagccaugautt

SEQ ID NO: 1415 - DNA, 21 bp, Artificial Sequence
  Description of Artificial Sequence: Synthetic oligonucleotide
  Description of Combined DNA/RNA Molecule: Synthetic oligonucleotide
uggcauugcagccaugaugtt

SEQ ID NO: 1416 - DNA, 21 bp, Artificial Sequence
  Description of Artificial Sequence: Synthetic oligonucleotide
  Description of Combined DNA/RNA Molecule: Synthetic oligonucleotide
gcauugcagccaugaugcutt

SEQ ID NO: 1417 - DNA, 21 bp, Artificial Sequence
  Description of Artificial Sequence: Synthetic oligonucleotide
  Description of Combined DNA/RNA Molecule: Synthetic oligonucleotide
cauugcagccaugaugcugtt

SEQ ID NO: 1418 - DNA, 21 bp, Artificial Sequence
  Description of Artificial Sequence: Synthetic oligonucleotide
  Description of Combined DNA/RNA Molecule: Synthetic oligonucleotide
auugcagccaugaugcugutt

SEQ ID NO: 1419 - DNA, 21 bp, Artificial Sequence
  Description of Artificial Sequence: Synthetic oligonucleotide
  Description of Combined DNA/RNA Molecule: Synthetic oligonucleotide
uugcagccaugaugcuguctt

SEQ ID NO: 1420 - DNA, 21 bp, Artificial Sequence
  Description of Artificial Sequence: Synthetic oligonucleotide
  Description of Combined DNA/RNA Molecule: Synthetic oligonucleotide
ugcagccaugaugcugucutt

SEQ ID NO: 1421 - DNA, 21 bp, Artificial Sequence
  Description of Artificial Sequence: Synthetic oligonucleotide
  Description of Combined DNA/RNA Molecule: Synthetic oligonucleotide
gcagccaugaugcugucugtt

SEQ ID NO: 1422 - DNA, 21 bp, Artificial Sequence
  Description of Artificial Sequence: Synthetic oligonucleotide
  Description of Combined DNA/RNA Molecule: Synthetic oligonucleotide
ccaugaugcugucugccgatt

SEQ ID NO: 1423 - DNA, 21 bp, Artificial Sequence
  Description of Artificial Sequence: Synthetic oligonucleotide
  Description of Combined DNA/RNA Molecule: Synthetic oligonucleotide
caugaugcugucugccgagtt

SEQ ID NO: 1424 - DNA, 21 bp, Artificial Sequence
  Description of Artificial Sequence: Synthetic oligonucleotide
  Description of Combined DNA/RNA Molecule: Synthetic oligonucleotide
cuggccgaguugaggcagatt

SEQ ID NO: 1425 - DNA, 21 bp, Artificial Sequence
  Description of Artificial Sequence: Synthetic oligonucleotide
  Description of Combined DNA/RNA Molecule: Synthetic oligonucleotide
uggccgaguugaggcagagtt

SEQ ID NO: 1426 - DNA, 21 bp, Artificial Sequence
  Description of Artificial Sequence: Synthetic oligonucleotide
  Description of Combined DNA/RNA Molecule: Synthetic oligonucleotide
ggccgaguugaggcagagatt

SEQ ID NO: 1427 - DNA, 21 bp, Artificial Sequence
  Description of Artificial Sequence: Synthetic oligonucleotide
  Description of Combined DNA/RNA Molecule: Synthetic oligonucleotide
gccgaguugaggcagagactt

SEQ ID NO: 1428 - DNA, 21 bp, Artificial Sequence
  Description of Artificial Sequence: Synthetic oligonucleotide
  Description of Combined DNA/RNA Molecule: Synthetic oligonucleotide
ccgaguugaggcagagacutt

SEQ ID NO: 1429 - DNA, 21 bp, Artificial Sequence
  Description of Artificial Sequence: Synthetic oligonucleotide
  Description of Combined DNA/RNA Molecule: Synthetic oligonucleotide
cgaguugaggcagagacugtt

SEQ ID NO: 1430 - DNA, 21 bp, Artificial Sequence
  Description of Artificial Sequence: Synthetic oligonucleotide
  Description of Combined DNA/RNA Molecule: Synthetic oligonucleotide
gaguugaggcagagacugatt

SEQ ID NO: 1431 - DNA, 21 bp, Artificial Sequence
  Description of Artificial Sequence: Synthetic oligonucleotide
  Description of Combined DNA/RNA Molecule: Synthetic oligonucleotide
aguugaggcagagacugautt

SEQ ID NO: 1432 - DNA, 21 bp, Artificial Sequence
  Description of Artificial Sequence: Synthetic oligonucleotide
  Description of Combined DNA/RNA Molecule: Synthetic oligonucleotide
ugaggcagagacugauccatt

SEQ ID NO: 1433 - DNA, 21 bp, Artificial Sequence
  Description of Artificial Sequence: Synthetic oligonucleotide
  Description of Combined DNA/RNA Molecule: Synthetic oligonucleotide
gaggcagagacugauccactt

SEQ ID NO: 1434 - DNA, 21 bp, Artificial Sequence
  Description of Artificial Sequence: Synthetic oligonucleotide
  Description of Combined DNA/RNA Molecule: Synthetic oligonucleotide
aggcagagacugauccacutt

SEQ ID NO: 1435 - DNA, 21 bp, Artificial Sequence
  Description of Artificial Sequence: Synthetic oligonucleotide
  Description of Combined DNA/RNA Molecule: Synthetic oligonucleotide
ggcagagacugauccacuutt

SEQ ID NO: 1436 - DNA, 21 bp, Artificial Sequence
  Description of Artificial Sequence: Synthetic oligonucleotide
  Description of Combined DNA/RNA Molecule: Synthetic oligonucleotide
cagagacugauccacuucutt

SEQ ID NO: 1437 - DNA, 21 bp, Artificial Sequence
  Description of Artificial Sequence: Synthetic oligonucleotide
  Description of Combined DNA/RNA Molecule: Synthetic oligonucleotide
gagacugauccacuucucutt

SEQ ID NO: 1438 - DNA, 21 bp, Artificial Sequence
  Description of Artificial Sequence: Synthetic oligonucleotide
  Description of Combined DNA/RNA Molecule: Synthetic oligonucleotide
agacugauccacuucucugtt

SEQ ID NO: 1439 - DNA, 21 bp, Artificial Sequence
  Description of Artificial Sequence: Synthetic oligonucleotide
  Description of Combined DNA/RNA Molecule: Synthetic oligonucleotide
cugauccacuucucugccatt

SEQ ID NO: 1440 - DNA, 21 bp, Artificial Sequence
  Description of Artificial Sequence: Synthetic oligonucleotide
  Description of Combined DNA/RNA Molecule: Synthetic oligonucleotide
ugauccacuucucugccaatt

SEQ ID NO: 1441 - DNA, 21 bp, Artificial Sequence
  Description of Artificial Sequence: Synthetic oligonucleotide
  Description of Combined DNA/RNA Molecule: Synthetic oligonucleotide
gauccacuucucugccaaatt

SEQ ID NO: 1442 - DNA, 21 bp, Artificial Sequence
  Description of Artificial Sequence: Synthetic oligonucleotide
  Description of Combined DNA/RNA Molecule: Synthetic oligonucleotide
auccacuucucugccaaagtt

SEQ ID NO: 1443 - DNA, 21 bp, Artificial Sequence
  Description of Artificial Sequence: Synthetic oligonucleotide
  Description of Combined DNA/RNA Molecule: Synthetic oligonucleotide
uccacuucucugccaaagatt

SEQ ID NO: 1444 - DNA, 21 bp, Artificial Sequence
  Description of Artificial Sequence: Synthetic oligonucleotide
  Description of Combined DNA/RNA Molecule: Synthetic oligonucleotide
ccacuucucugccaaagautt

SEQ ID NO: 1445 - DNA, 21 bp, Artificial Sequence
  Description of Artificial Sequence: Synthetic oligonucleotide
  Description of Combined DNA/RNA Molecule: Synthetic oligonucleotide
cacuucucugccaaagaugtt

SEQ ID NO: 1446 - DNA, 21 bp, Artificial Sequence
  Description of Artificial Sequence: Synthetic oligonucleotide
  Description of Combined DNA/RNA Molecule: Synthetic oligonucleotide
acuucucugccaaagaugutt

SEQ ID NO: 1447 - DNA, 21 bp, Artificial Sequence
  Description of Artificial Sequence: Synthetic oligonucleotide
  Description of Combined DNA/RNA Molecule: Synthetic oligonucleotide
cuucucugccaaagauguctt

SEQ ID NO: 1448 - DNA, 21 bp, Artificial Sequence
  Description of Artificial Sequence: Synthetic oligonucleotide
  Description of Combined DNA/RNA Molecule: Synthetic oligonucleotide
ucucugccaaagaugucautt

SEQ ID NO: 1449 - DNA, 21 bp, Artificial Sequence
  Description of Artificial Sequence: Synthetic oligonucleotide
  Description of Combined DNA/RNA Molecule: Synthetic oligonucleotide
ucugccaaagaugucaucatt

SEQ ID NO: 1450 - DNA, 21 bp, Artificial Sequence
  Description of Artificial Sequence: Synthetic oligonucleotide
  Description of Combined DNA/RNA Molecule: Synthetic oligonucleotide
cugccaaagaugucaucaatt

SEQ ID NO: 1451 - DNA, 21 bp, Artificial Sequence
  Description of Artificial Sequence: Synthetic oligonucleotide
  Description of Combined DNA/RNA Molecule: Synthetic oligonucleotide
ugccaaagaugucaucaautt

SEQ ID NO: 1452 - DNA, 21 bp, Artificial Sequence
  Description of Artificial Sequence: Synthetic oligonucleotide
  Description of Combined DNA/RNA Molecule: Synthetic oligonucleotide
gccaaagaugucaucaaugtt

SEQ ID NO: 1453 - DNA, 21 bp, Artificial Sequence
  Description of Artificial Sequence: Synthetic oligonucleotide
  Description of Combined DNA/RNA Molecule: Synthetic oligonucleotide
ccaaagaugucaucaaugatt

SEQ ID NO: 1454 - DNA, 21 bp, Artificial Sequence
  Description of Artificial Sequence: Synthetic oligonucleotide
  Description of Combined DNA/RNA Molecule: Synthetic oligonucleotide
caaagaugucaucaaugagtt

SEQ ID NO: 1455 - DNA, 21 bp, Artificial Sequence
  Description of Artificial Sequence: Synthetic oligonucleotide
  Description of Combined DNA/RNA Molecule: Synthetic oligonucleotide
gaugucaucaaugaggccutt

SEQ ID NO: 1456 - DNA, 21 bp, Artificial Sequence
  Description of Artificial Sequence: Synthetic oligonucleotide
  Description of Combined DNA/RNA Molecule: Synthetic oligonucleotide
augucaucaaugaggccugtt

SEQ ID NO: 1457 - DNA, 21 bp, Artificial Sequence
  Description of Artificial Sequence: Synthetic oligonucleotide
  Description of Combined DNA/RNA Molecule: Synthetic oligonucleotide
gucaucaaugaggccuggutt

SEQ ID NO: 1458 - DNA, 21 bp, Artificial Sequence
  Description of Artificial Sequence: Synthetic oligonucleotide
  Description of Combined DNA/RNA Molecule: Synthetic oligonucleotide
ucaucaaugaggccugguutt

SEQ ID NO: 1459 - DNA, 21 bp, Artificial Sequence
  Description of Artificial Sequence: Synthetic oligonucleotide
  Description of Combined DNA/RNA Molecule: Synthetic oligonucleotide
caucaaugaggccugguuctt

SEQ ID NO: 1460 - DNA, 21 bp, Artificial Sequence
  Description of Artificial Sequence: Synthetic oligonucleotide
  Description of Combined DNA/RNA Molecule: Synthetic oligonucleotide
caaugaggccugguucccutt

SEQ ID NO: 1461 - DNA, 21 bp, Artificial Sequence
  Description of Artificial Sequence: Synthetic oligonucleotide
  Description of Combined DNA/RNA Molecule: Synthetic oligonucleotide
aaugaggccugguucccugtt

SEQ ID NO: 1462 - DNA, 21 bp, Artificial Sequence
  Description of Artificial Sequence: Synthetic oligonucleotide
  Description of Combined DNA/RNA Molecule: Synthetic oligonucleotide
augaggccugguucccugatt

SEQ ID NO: 1463 - DNA, 21 bp, Artificial Sequence
  Description of Artificial Sequence: Synthetic oligonucleotide
  Description of Combined DNA/RNA Molecule: Synthetic oligonucleotide
ugaggccugguucccugagtt

SEQ ID NO: 1464 - DNA, 21 bp, Artificial Sequence
  Description of Artificial Sequence: Synthetic oligonucleotide
  Description of Combined DNA/RNA Molecule: Synthetic oligonucleotide
aggccugguucccugaggatt

SEQ ID NO: 1465 - DNA, 21 bp, Artificial Sequence
  Description of Artificial Sequence: Synthetic oligonucleotide
  Description of Combined DNA/RNA Molecule: Synthetic oligonucleotide
gaggaccagcggguacugatt

SEQ ID NO: 1466 - DNA, 21 bp, Artificial Sequence
  Description of Artificial Sequence: Synthetic oligonucleotide
  Description of Combined DNA/RNA Molecule: Synthetic oligonucleotide
aggaccagcggguacugactt

SEQ ID NO: 1467 - DNA, 21 bp, Artificial Sequence
  Description of Artificial Sequence: Synthetic oligonucleotide
  Description of Combined DNA/RNA Molecule: Synthetic oligonucleotide
gggcagguuggcagcuguutt

SEQ ID NO: 1468 - DNA, 21 bp, Artificial Sequence
  Description of Artificial Sequence: Synthetic oligonucleotide
  Description of Combined DNA/RNA Molecule: Synthetic oligonucleotide
ggcagguuggcagcuguuutt

SEQ ID NO: 1469 - DNA, 21 bp, Artificial Sequence
  Description of Artificial Sequence: Synthetic oligonucleotide
  Description of Combined DNA/RNA Molecule: Synthetic oligonucleotide
gcagguuggcagcuguuuutt

SEQ ID NO: 1470 - DNA, 21 bp, Artificial Sequence
  Description of Artificial Sequence: Synthetic oligonucleotide
  Description of Combined DNA/RNA Molecule: Synthetic oligonucleotide
agccuggaggagugagccatt

SEQ ID NO: 1471 - DNA, 21 bp, Artificial Sequence
  Description of Artificial Sequence: Synthetic oligonucleotide
  Description of Combined DNA/RNA Molecule: Synthetic oligonucleotide
uggaggagugagccaggcatt

SEQ ID NO: 1472 - DNA, 21 bp, Artificial Sequence
  Description of Artificial Sequence: Synthetic oligonucleotide
  Description of Combined DNA/RNA Molecule: Synthetic oligonucleotide
gaggagugagccaggcagutt

SEQ ID NO: 1473 - DNA, 21 bp, Artificial Sequence
  Description of Artificial Sequence: Synthetic oligonucleotide
  Description of Combined DNA/RNA Molecule: Synthetic oligonucleotide
aggagugagccaggcagugtt

SEQ ID NO: 1474 - DNA, 21 bp, Artificial Sequence
  Description of Artificial Sequence: Synthetic oligonucleotide
  Description of Combined DNA/RNA Molecule: Synthetic oligonucleotide
ggagugagccaggcagugatt

SEQ ID NO: 1475 - DNA, 21 bp, Artificial Sequence
  Description of Artificial Sequence: Synthetic oligonucleotide
  Description of Combined DNA/RNA Molecule: Synthetic oligonucleotide
gagugagccaggcagugagtt

SEQ ID NO: 1476 - DNA, 21 bp, Artificial Sequence
  Description of Artificial Sequence: Synthetic oligonucleotide
  Description of Combined DNA/RNA Molecule: Synthetic oligonucleotide
agugagccaggcagugagatt

SEQ ID NO: 1477 - DNA, 21 bp, Artificial Sequence
  Description of Artificial Sequence: Synthetic oligonucleotide
  Description of Combined DNA/RNA Molecule: Synthetic oligonucleotide
gugagccaggcagugagactt

SEQ ID NO: 1478 - DNA, 21 bp, Artificial Sequence
  Description of Artificial Sequence: Synthetic oligonucleotide
  Description of Combined DNA/RNA Molecule: Synthetic oligonucleotide
ugagccaggcagugagacutt

SEQ ID NO: 1479 - DNA, 21 bp, Artificial Sequence
  Description of Artificial Sequence: Synthetic oligonucleotide
  Description of Combined DNA/RNA Molecule: Synthetic oligonucleotide
gagccaggcagugagacugtt

SEQ ID NO: 1480 - DNA, 21 bp, Artificial Sequence
  Description of Artificial Sequence: Synthetic oligonucleotide
  Description of Combined DNA/RNA Molecule: Synthetic oligonucleotide
ccagcucccagccaggauutt

SEQ ID NO: 1481 - DNA, 21 bp, Artificial Sequence
  Description of Artificial Sequence: Synthetic oligonucleotide
  Description of Combined DNA/RNA Molecule: Synthetic oligonucleotide
cagcucccagccaggauuctt

SEQ ID NO: 1482 - DNA, 21 bp, Artificial Sequence
  Description of Artificial Sequence: Synthetic oligonucleotide
  Description of Combined DNA/RNA Molecule: Synthetic oligonucleotide
cagcuccugcacaguccuctt

SEQ ID NO: 1483 - DNA, 21 bp, Artificial Sequence
  Description of Artificial Sequence: Synthetic oligonucleotide
  Description of Combined DNA/RNA Molecule: Synthetic oligonucleotide
uccugcacaguccuccccatt

SEQ ID NO: 1484 - DNA, 21 bp, Artificial Sequence
  Description of Artificial Sequence: Synthetic oligonucleotide
  Description of Combined DNA/RNA Molecule: Synthetic oligonucleotide
cacggccucuaggucuccutt

SEQ ID NO: 1485 - DNA, 21 bp, Artificial Sequence
  Description of Artificial Sequence: Synthetic oligonucleotide
  Description of Combined DNA/RNA Molecule: Synthetic oligonucleotide
acggccucuaggucuccuctt

SEQ ID NO: 1486 - DNA, 21 bp, Artificial Sequence
  Description of Artificial Sequence: Synthetic oligonucleotide
  Description of Combined DNA/RNA Molecule: Synthetic oligonucleotide
aggacgaggacggcgacuatt

SEQ ID NO: 1487 - DNA, 21 bp, Artificial Sequence
  Description of Artificial Sequence: Synthetic oligonucleotide
  Description of Combined DNA/RNA Molecule: Synthetic oligonucleotide
acgaggacggcgacuacgatt

SEQ ID NO: 1488 - DNA, 21 bp, Artificial Sequence
  Description of Artificial Sequence: Synthetic oligonucleotide
  Description of Combined DNA/RNA Molecule: Synthetic oligonucleotide
aggacggcgacuacgaggatt

SEQ ID NO: 1489 - DNA, 21 bp, Artificial Sequence
  Description of Artificial Sequence: Synthetic oligonucleotide
  Description of Combined DNA/RNA Molecule: Synthetic oligonucleotide
acggcgacuacgaggagcutt

SEQ ID NO: 1490 - DNA, 21 bp, Artificial Sequence
  Description of Artificial Sequence: Synthetic oligonucleotide
  Description of Combined DNA/RNA Molecule: Synthetic oligonucleotide
gcgacuacgaggagcuggutt

SEQ ID NO: 1491 - DNA, 21 bp, Artificial Sequence
  Description of Artificial Sequence: Synthetic oligonucleotide
  Description of Combined DNA/RNA Molecule: Synthetic oligonucleotide
cgacuacgaggagcuggugtt

SEQ ID NO: 1492 - DNA, 21 bp, Artificial Sequence
  Description of Artificial Sequence: Synthetic oligonucleotide
  Description of Combined DNA/RNA Molecule: Synthetic oligonucleotide
acuacgaggagcuggugcutt

SEQ ID NO: 1493 - DNA, 21 bp, Artificial Sequence
  Description of Artificial Sequence: Synthetic oligonucleotide
  Description of Combined DNA/RNA Molecule: Synthetic oligonucleotide
cuacgaggagcuggugcuatt

SEQ ID NO: 1494 - DNA, 21 bp, Artificial Sequence
  Description of Artificial Sequence: Synthetic oligonucleotide
  Description of Combined DNA/RNA Molecule: Synthetic oligonucleotide
uacgaggagcuggugcuagtt

SEQ ID NO: 1495 - DNA, 21 bp, Artificial Sequence
  Description of Artificial Sequence: Synthetic oligonucleotide
  Description of Combined DNA/RNA Molecule: Synthetic oligonucleotide
gaggagcuggugcuagccutt

SEQ ID NO: 1496 - DNA, 21 bp, Artificial Sequence
  Description of Artificial Sequence: Synthetic oligonucleotide
  Description of Combined DNA/RNA Molecule: Synthetic oligonucleotide
aggagcuggugcuagccuutt

SEQ ID NO: 1497 - DNA, 21 bp, Artificial Sequence
  Description of Artificial Sequence: Synthetic oligonucleotide
  Description of Combined DNA/RNA Molecule: Synthetic oligonucleotide
uggugcuagccuugcguuctt

SEQ ID NO: 1498 - DNA, 21 bp, Artificial Sequence
  Description of Artificial Sequence: Synthetic oligonucleotide
  Description of Combined DNA/RNA Molecule: Synthetic oligonucleotide
gcuagccuugcguuccgagtt

SEQ ID NO: 1499 - DNA, 21 bp, Artificial Sequence
  Description of Artificial Sequence: Synthetic oligonucleotide
  Description of Combined DNA/RNA Molecule: Synthetic oligonucleotide
agccuugcguuccgaggagtt

SEQ ID NO: 1500 - DNA, 21 bp, Artificial Sequence
  Description of Artificial Sequence: Synthetic oligonucleotide
  Description of Combined DNA/RNA Molecule: Synthetic oligonucleotide
ccuugcguuccgaggaggatt

SEQ ID NO: 1501 - DNA, 21 bp, Artificial Sequence
  Description of Artificial Sequence: Synthetic oligonucleotide
  Description of Combined DNA/RNA Molecule: Synthetic oligonucleotide
cuugcguuccgaggaggactt

SEQ ID NO: 1502 - DNA, 21 bp, Artificial Sequence
  Description of Artificial Sequence: Synthetic oligonucleotide
  Description of Combined DNA/RNA Molecule: Synthetic oligonucleotide
acagccaccuuccaccgcutt

SEQ ID NO: 1503 - DNA, 21 bp, Artificial Sequence
  Description of Artificial Sequence: Synthetic oligonucleotide
  Description of Combined DNA/RNA Molecule: Synthetic oligonucleotide
ugcgccaaggauccguggatt

SEQ ID NO: 1504 - DNA, 21 bp, Artificial Sequence
  Description of Artificial Sequence: Synthetic oligonucleotide
  Description of Combined DNA/RNA Molecule: Synthetic oligonucleotide
gcaccuacgugguggugcutt

SEQ ID NO: 1505 - DNA, 21 bp, Artificial Sequence
  Description of Artificial Sequence: Synthetic oligonucleotide
  Description of Combined DNA/RNA Molecule: Synthetic oligonucleotide
caccuacgugguggugcugtt

SEQ ID NO: 1506 - DNA, 21 bp, Artificial Sequence
  Description of Artificial Sequence: Synthetic oligonucleotide
  Description of Combined DNA/RNA Molecule: Synthetic oligonucleotide
accuacgugguggugcugatt

SEQ ID NO: 1507 - DNA, 21 bp, Artificial Sequence
  Description of Artificial Sequence: Synthetic oligonucleotide
  Description of Combined DNA/RNA Molecule: Synthetic oligonucleotide
ccuacgugguggugcugaatt

SEQ ID NO: 1508 - DNA, 21 bp, Artificial Sequence
  Description of Artificial Sequence: Synthetic oligonucleotide
  Description of Combined DNA/RNA Molecule: Synthetic oligonucleotide
cuacgugguggugcugaagtt

SEQ ID NO: 1509 - DNA, 21 bp, Artificial Sequence
  Description of Artificial Sequence: Synthetic oligonucleotide
  Description of Combined DNA/RNA Molecule: Synthetic oligonucleotide
acgugguggugcugaaggatt

SEQ ID NO: 1510 - DNA, 21 bp, Artificial Sequence
  Description of Artificial Sequence: Synthetic oligonucleotide
  Description of Combined DNA/RNA Molecule: Synthetic oligonucleotide
cgugguggugcugaaggagtt

SEQ ID NO: 1511 - DNA, 21 bp, Artificial Sequence
  Description of Artificial Sequence: Synthetic oligonucleotide
  Description of Combined DNA/RNA Molecule: Synthetic oligonucleotide
ugguggugcugaaggaggatt

SEQ ID NO: 1512 - DNA, 21 bp, Artificial Sequence
  Description of Artificial Sequence: Synthetic oligonucleotide
  Description of Combined DNA/RNA Molecule: Synthetic oligonucleotide
gguggugcugaaggaggagtt

SEQ ID NO: 1513 - DNA, 21 bp, Artificial Sequence
  Description of Artificial Sequence: Synthetic oligonucleotide
  Description of Combined DNA/RNA Molecule: Synthetic oligonucleotide
guggugcugaaggaggagatt

SEQ ID NO: 1514 - DNA, 21 bp, Artificial Sequence
  Description of Artificial Sequence: Synthetic oligonucleotide
  Description of Combined DNA/RNA Molecule: Synthetic oligonucleotide
uggugcugaaggaggagactt

SEQ ID NO: 1515 - DNA, 21 bp, Artificial Sequence
  Description of Artificial Sequence: Synthetic oligonucleotide
  Description of Combined DNA/RNA Molecule: Synthetic oligonucleotide
ugcugaaggaggagacccatt

SEQ ID NO: 1516 - DNA, 21 bp, Artificial Sequence
  Description of Artificial Sequence: Synthetic oligonucleotide
  Description of Combined DNA/RNA Molecule: Synthetic oligonucleotide
gcugaaggaggagacccactt

SEQ ID NO: 1517 - DNA, 21 bp, Artificial Sequence
  Description of Artificial Sequence: Synthetic oligonucleotide
  Description of Combined DNA/RNA Molecule: Synthetic oligonucleotide
ucgcagucagagcgcacugtt

SEQ ID NO: 1518 - DNA, 21 bp, Artificial Sequence
  Description of Artificial Sequence: Synthetic oligonucleotide
  Description of Combined DNA/RNA Molecule: Synthetic oligonucleotide
gccggggauaccucaccaatt

SEQ ID NO: 1519 - DNA, 21 bp, Artificial Sequence
  Description of Artificial Sequence: Synthetic oligonucleotide
  Description of Combined DNA/RNA Molecule: Synthetic oligonucleotide
ccggggauaccucaccaagtt

SEQ ID NO: 1520 - DNA, 21 bp, Artificial Sequence
  Description of Artificial Sequence: Synthetic oligonucleotide
  Description of Combined DNA/RNA Molecule: Synthetic oligonucleotide
cggggauaccucaccaagatt

SEQ ID NO: 1521 - DNA, 21 bp, Artificial Sequence
  Description of Artificial Sequence: Synthetic oligonucleotide
  Description of Combined DNA/RNA Molecule: Synthetic oligonucleotide
ggggauaccucaccaagautt

SEQ ID NO: 1522 - DNA, 21 bp, Artificial Sequence
  Description of Artificial Sequence: Synthetic oligonucleotide
  Description of Combined DNA/RNA Molecule: Synthetic oligonucleotide
gauaccucaccaagauccutt

SEQ ID NO: 1523 - DNA, 21 bp, Artificial Sequence
  Description of Artificial Sequence: Synthetic oligonucleotide
  Description of Combined DNA/RNA Molecule: Synthetic oligonucleotide
auaccucaccaagauccugtt

SEQ ID NO: 1524 - DNA, 21 bp, Artificial Sequence
  Description of Artificial Sequence: Synthetic oligonucleotide
  Description of Combined DNA/RNA Molecule: Synthetic oligonucleotide
accucaccaagauccugcatt

SEQ ID NO: 1525 - DNA, 21 bp, Artificial Sequence
  Description of Artificial Sequence: Synthetic oligonucleotide
  Description of Combined DNA/RNA Molecule: Synthetic oligonucleotide
ccucaccaagauccugcautt

SEQ ID NO: 1526 - DNA, 21 bp, Artificial Sequence
  Description of Artificial Sequence: Synthetic oligonucleotide
  Description of Combined DNA/RNA Molecule: Synthetic oligonucleotide
cucaccaagauccugcaugtt

SEQ ID NO: 1527 - DNA, 21 bp, Artificial Sequence
  Description of Artificial Sequence: Synthetic oligonucleotide
  Description of Combined DNA/RNA Molecule: Synthetic oligonucleotide
ucaccaagauccugcaugutt

SEQ ID NO: 1528 - DNA, 21 bp, Artificial Sequence
  Description of Artificial Sequence: Synthetic oligonucleotide
  Description of Combined DNA/RNA Molecule: Synthetic oligonucleotide
caccaagauccugcauguctt

SEQ ID NO: 1529 - DNA, 21 bp, Artificial Sequence
  Description of Artificial Sequence: Synthetic oligonucleotide
  Description of Combined DNA/RNA Molecule: Synthetic oligonucleotide
accaagauccugcaugucutt

SEQ ID NO: 1530 - DNA, 21 bp, Artificial Sequence
  Description of Artificial Sequence: Synthetic oligonucleotide
  Description of Combined DNA/RNA Molecule: Synthetic oligonucleotide
ccaagauccugcaugucuutt

SEQ ID NO: 1531 - DNA, 21 bp, Artificial Sequence
  Description of Artificial Sequence: Synthetic oligonucleotide
  Description of Combined DNA/RNA Molecule: Synthetic oligonucleotide
caagauccugcaugucuuctt

SEQ ID NO: 1532 - DNA, 21 bp, Artificial Sequence
  Description of Artificial Sequence: Synthetic oligonucleotide
  Description of Combined DNA/RNA Molecule: Synthetic oligonucleotide
agauccugcaugucuuccatt

SEQ ID NO: 1533 - DNA, 21 bp, Artificial Sequence
  Description of Artificial Sequence: Synthetic oligonucleotide
  Description of Combined DNA/RNA Molecule: Synthetic oligonucleotide
gauccugcaugucuuccautt

SEQ ID NO: 1534 - DNA, 21 bp, Artificial Sequence
  Description of Artificial Sequence: Synthetic oligonucleotide
  Description of Combined DNA/RNA Molecule: Synthetic oligonucleotide
ccuucuuccuggcuuccugtt

SEQ ID NO: 1535 - DNA, 21 bp, Artificial Sequence
  Description of Artificial Sequence: Synthetic oligonucleotide
  Description of Combined DNA/RNA Molecule: Synthetic oligonucleotide
uucuuccuggcuuccuggutt

SEQ ID NO: 1536 - DNA, 21 bp, Artificial Sequence
  Description of Artificial Sequence: Synthetic oligonucleotide
  Description of Combined DNA/RNA Molecule: Synthetic oligonucleotide
ucuuccuggcuuccuggugtt

SEQ ID NO: 1537 - DNA, 21 bp, Artificial Sequence
  Description of Artificial Sequence: Synthetic oligonucleotide
  Description of Combined DNA/RNA Molecule: Synthetic oligonucleotide
cuuccuggcuuccuggugatt

SEQ ID NO: 1538 - DNA, 21 bp, Artificial Sequence
  Description of Artificial Sequence: Synthetic oligonucleotide
  Description of Combined DNA/RNA Molecule: Synthetic oligonucleotide
uuccuggcuuccuggugaatt

SEQ ID NO: 1539 - DNA, 21 bp, Artificial Sequence
  Description of Artificial Sequence: Synthetic oligonucleotide
  Description of Combined DNA/RNA Molecule: Synthetic oligonucleotide
uccuggcuuccuggugaagtt

SEQ ID NO: 1540 - DNA, 21 bp, Artificial Sequence
  Description of Artificial Sequence: Synthetic oligonucleotide
  Description of Combined DNA/RNA Molecule: Synthetic oligonucleotide
ccuggcuuccuggugaagatt

SEQ ID NO: 1541 - DNA, 21 bp, Artificial Sequence
  Description of Artificial Sequence: Synthetic oligonucleotide
  Description of Combined DNA/RNA Molecule: Synthetic oligonucleotide
cuggcuuccuggugaagautt

SEQ ID NO: 1542 - DNA, 21 bp, Artificial Sequence
  Description of Artificial Sequence: Synthetic oligonucleotide
  Description of Combined DNA/RNA Molecule: Synthetic oligonucleotide
uggcuuccuggugaagaugtt

SEQ ID NO: 1543 - DNA, 21 bp, Artificial Sequence
  Description of Artificial Sequence: Synthetic oligonucleotide
  Description of Combined DNA/RNA Molecule: Synthetic oligonucleotide
ggcuuccuggugaagaugatt

SEQ ID NO: 1544 - DNA, 21 bp, Artificial Sequence
  Description of Artificial Sequence: Synthetic oligonucleotide
  Description of Combined DNA/RNA Molecule: Synthetic oligonucleotide
gcuuccuggugaagaugagtt

SEQ ID NO: 1545 - DNA, 21 bp, Artificial Sequence
  Description of Artificial Sequence: Synthetic oligonucleotide
  Description of Combined DNA/RNA Molecule: Synthetic oligonucleotide
cuuccuggugaagaugagutt

SEQ ID NO: 1546 - DNA, 21 bp, Artificial Sequence
  Description of Artificial Sequence: Synthetic oligonucleotide
  Description of Combined DNA/RNA Molecule: Synthetic oligonucleotide
uuccuggugaagaugagugtt

SEQ ID NO: 1547 - DNA, 21 bp, Artificial Sequence
  Description of Artificial Sequence: Synthetic oligonucleotide
  Description of Combined DNA/RNA Molecule: Synthetic oligonucleotide
ggugaagaugaguggcgactt

SEQ ID NO: 1548 - DNA, 21 bp, Artificial Sequence
  Description of Artificial Sequence: Synthetic oligonucleotide
  Description of Combined DNA/RNA Molecule: Synthetic oligonucleotide
ugaagaugaguggcgaccutt

SEQ ID NO: 1549 - DNA, 21 bp, Artificial Sequence
  Description of Artificial Sequence: Synthetic oligonucleotide
  Description of Combined DNA/RNA Molecule: Synthetic oligonucleotide
agaugaguggcgaccugcutt

SEQ ID NO: 1550 - DNA, 21 bp, Artificial Sequence
  Description of Artificial Sequence: Synthetic oligonucleotide
  Description of Combined DNA/RNA Molecule: Synthetic oligonucleotide
gaugaguggcgaccugcugtt

SEQ ID NO: 1551 - DNA, 21 bp, Artificial Sequence
  Description of Artificial Sequence: Synthetic oligonucleotide
  Description of Combined DNA/RNA Molecule: Synthetic oligonucleotide
ugaguggcgaccugcuggatt

SEQ ID NO: 1552 - DNA, 21 bp, Artificial Sequence
  Description of Artificial Sequence: Synthetic oligonucleotide
  Description of Combined DNA/RNA Molecule: Synthetic oligonucleotide
ugaaguugccccaugucgatt

SEQ ID NO: 1553 - DNA, 21 bp, Artificial Sequence
  Description of Artificial Sequence: Synthetic oligonucleotide
  Description of Combined DNA/RNA Molecule: Synthetic oligonucleotide
gaaguugccccaugucgactt

SEQ ID NO: 1554 - DNA, 21 bp, Artificial Sequence
  Description of Artificial Sequence: Synthetic oligonucleotide
  Description of Combined DNA/RNA Molecule: Synthetic oligonucleotide
aaguugccccaugucgacutt

SEQ ID NO: 1555 - DNA, 21 bp, Artificial Sequence
  Description of Artificial Sequence: Synthetic oligonucleotide
  Description of Combined DNA/RNA Molecule: Synthetic oligonucleotide
aguugccccaugucgacuatt

SEQ ID NO: 1556 - DNA, 21 bp, Artificial Sequence
  Description of Artificial Sequence: Synthetic oligonucleotide
  Description of Combined DNA/RNA Molecule: Synthetic oligonucleotide
guugccccaugucgacuactt

SEQ ID NO: 1557 - DNA, 21 bp, Artificial Sequence
  Description of Artificial Sequence: Synthetic oligonucleotide
  Description of Combined DNA/RNA Molecule: Synthetic oligonucleotide
uugccccaugucgacuacatt

SEQ ID NO: 1558 - DNA, 21 bp, Artificial Sequence
  Description of Artificial Sequence: Synthetic oligonucleotide
  Description of Combined DNA/RNA Molecule: Synthetic oligonucleotide
ugccccaugucgacuacautt

SEQ ID NO: 1559 - DNA, 21 bp, Artificial Sequence
  Description of Artificial Sequence: Synthetic oligonucleotide
  Description of Combined DNA/RNA Molecule: Synthetic oligonucleotide
gccccaugucgacuacauctt

SEQ ID NO: 1560 - DNA, 21 bp, Artificial Sequence
  Description of Artificial Sequence: Synthetic oligonucleotide
  Description of Combined DNA/RNA Molecule: Synthetic oligonucleotide
ccaugucgacuacaucgagtt

SEQ ID NO: 1561 - DNA, 21 bp, Artificial Sequence
  Description of Artificial Sequence: Synthetic oligonucleotide
  Description of Combined DNA/RNA Molecule: Synthetic oligonucleotide
augucgacuacaucgaggatt

SEQ ID NO: 1562 - DNA, 21 bp, Artificial Sequence
  Description of Artificial Sequence: Synthetic oligonucleotide
  Description of Combined DNA/RNA Molecule: Synthetic oligonucleotide
ugucgacuacaucgaggagtt

SEQ ID NO: 1563 - DNA, 21 bp, Artificial Sequence
  Description of Artificial Sequence: Synthetic oligonucleotide
  Description of Combined DNA/RNA Molecule: Synthetic oligonucleotide
ucgacuacaucgaggaggatt

SEQ ID NO: 1564 - DNA, 21 bp, Artificial Sequence
  Description of Artificial Sequence: Synthetic oligonucleotide
  Description of Combined DNA/RNA Molecule: Synthetic oligonucleotide
cgacuacaucgaggaggactt

SEQ ID NO: 1565 - DNA, 21 bp, Artificial Sequence
  Description of Artificial Sequence: Synthetic oligonucleotide
  Description of Combined DNA/RNA Molecule: Synthetic oligonucleotide
gacuacaucgaggaggacutt

SEQ ID NO: 1566 - DNA, 21 bp, Artificial Sequence
  Description of Artificial Sequence: Synthetic oligonucleotide
  Description of Combined DNA/RNA Molecule: Synthetic oligonucleotide
cacacagcuccaccagcugtt

SEQ ID NO: 1567 - DNA, 21 bp, Artificial Sequence
  Description of Artificial Sequence: Synthetic oligonucleotide
  Description of Combined DNA/RNA Molecule: Synthetic oligonucleotide
auggggacccguguccacutt

SEQ ID NO: 1568 - DNA, 21 bp, Artificial Sequence
  Description of Artificial Sequence: Synthetic oligonucleotide
  Description of Combined DNA/RNA Molecule: Synthetic oligonucleotide
cacguccucacaggcugcatt

SEQ ID NO: 1569 - DNA, 21 bp, Artificial Sequence
  Description of Artificial Sequence: Synthetic oligonucleotide
  Description of Combined DNA/RNA Molecule: Synthetic oligonucleotide
acguccucacaggcugcagtt

SEQ ID NO: 1570 - DNA, 21 bp, Artificial Sequence
  Description of Artificial Sequence: Synthetic oligonucleotide
  Description of Combined DNA/RNA Molecule: Synthetic oligonucleotide
guccucacaggcugcagcutt

SEQ ID NO: 1571 - DNA, 21 bp, Artificial Sequence
  Description of Artificial Sequence: Synthetic oligonucleotide
  Description of Combined DNA/RNA Molecule: Synthetic oligonucleotide
uccucacaggcugcagcuctt

SEQ ID NO: 1572 - DNA, 21 bp, Artificial Sequence
  Description of Artificial Sequence: Synthetic oligonucleotide
  Description of Combined DNA/RNA Molecule: Synthetic oligonucleotide
ucacaggcugcagcucccatt

SEQ ID NO: 1573 - DNA, 21 bp, Artificial Sequence
  Description of Artificial Sequence: Synthetic oligonucleotide
  Description of Combined DNA/RNA Molecule: Synthetic oligonucleotide
acaggcugcagcucccacutt

SEQ ID NO: 1574 - DNA, 21 bp, Artificial Sequence
  Description of Artificial Sequence: Synthetic oligonucleotide
  Description of Combined DNA/RNA Molecule: Synthetic oligonucleotide
acugggagguggaggaccutt

SEQ ID NO: 1575 - DNA, 21 bp, Artificial Sequence
  Description of Artificial Sequence: Synthetic oligonucleotide
  Description of Combined DNA/RNA Molecule: Synthetic oligonucleotide
cugggagguggaggaccuutt

SEQ ID NO: 1576 - DNA, 21 bp, Artificial Sequence
  Description of Artificial Sequence: Synthetic oligonucleotide
  Description of Combined DNA/RNA Molecule: Synthetic oligonucleotide
ugggagguggaggaccuugtt

SEQ ID NO: 1577 - DNA, 21 bp, Artificial Sequence
  Description of Artificial Sequence: Synthetic oligonucleotide
  Description of Combined DNA/RNA Molecule: Synthetic oligonucleotide
gagguggaggaccuuggcatt

SEQ ID NO: 1578 - DNA, 21 bp, Artificial Sequence
  Description of Artificial Sequence: Synthetic oligonucleotide
  Description of Combined DNA/RNA Molecule: Synthetic oligonucleotide
agguggaggaccuuggcactt

SEQ ID NO: 1579 - DNA, 21 bp, Artificial Sequence
  Description of Artificial Sequence: Synthetic oligonucleotide
  Description of Combined DNA/RNA Molecule: Synthetic oligonucleotide
uggaggaccuuggcacccatt

SEQ ID NO: 1580 - DNA, 21 bp, Artificial Sequence
  Description of Artificial Sequence: Synthetic oligonucleotide
  Description of Combined DNA/RNA Molecule: Synthetic oligonucleotide
gaggaccuuggcacccacatt

SEQ ID NO: 1581 - DNA, 21 bp, Artificial Sequence
  Description of Artificial Sequence: Synthetic oligonucleotide
  Description of Combined DNA/RNA Molecule: Synthetic oligonucleotide
aggaccuuggcacccacaatt

SEQ ID NO: 1582 - DNA, 21 bp, Artificial Sequence
  Description of Artificial Sequence: Synthetic oligonucleotide
  Description of Combined DNA/RNA Molecule: Synthetic oligonucleotide
ggaccuuggcacccacaagtt

SEQ ID NO: 1583 - DNA, 21 bp, Artificial Sequence
  Description of Artificial Sequence: Synthetic oligonucleotide
  Description of Combined DNA/RNA Molecule: Synthetic oligonucleotide
cacaagccgccugugcugatt

SEQ ID NO: 1584 - DNA, 21 bp, Artificial Sequence
  Description of Artificial Sequence: Synthetic oligonucleotide
  Description of Combined DNA/RNA Molecule: Synthetic oligonucleotide
acaagccgccugugcugagtt

SEQ ID NO: 1585 - DNA, 21 bp, Artificial Sequence
  Description of Artificial Sequence: Synthetic oligonucleotide
  Description of Combined DNA/RNA Molecule: Synthetic oligonucleotide
ugugcugaggccacgaggutt

SEQ ID NO: 1586 - DNA, 21 bp, Artificial Sequence
  Description of Artificial Sequence: Synthetic oligonucleotide
  Description of Combined DNA/RNA Molecule: Synthetic oligonucleotide
cacgaggucagcccaaccatt

SEQ ID NO: 1587 - DNA, 21 bp, Artificial Sequence
  Description of Artificial Sequence: Synthetic oligonucleotide
  Description of Combined DNA/RNA Molecule: Synthetic oligonucleotide
acgaggucagcccaaccagtt

SEQ ID NO: 1588 - DNA, 21 bp, Artificial Sequence
  Description of Artificial Sequence: Synthetic oligonucleotide
  Description of Combined DNA/RNA Molecule: Synthetic oligonucleotide
gaggucagcccaaccagugtt

SEQ ID NO: 1589 - DNA, 21 bp, Artificial Sequence
  Description of Artificial Sequence: Synthetic oligonucleotide
  Description of Combined DNA/RNA Molecule: Synthetic oligonucleotide
acagggaggccagcauccatt

SEQ ID NO: 1590 - DNA, 21 bp, Artificial Sequence
  Description of Artificial Sequence: Synthetic oligonucleotide
  Description of Combined DNA/RNA Molecule: Synthetic oligonucleotide
gaggccagcauccacgcuutt

SEQ ID NO: 1591 - DNA, 21 bp, Artificial Sequence
  Description of Artificial Sequence: Synthetic oligonucleotide
  Description of Combined DNA/RNA Molecule: Synthetic oligonucleotide
aggccagcauccacgcuuctt

SEQ ID NO: 1592 - DNA, 21 bp, Artificial Sequence
  Description of Artificial Sequence: Synthetic oligonucleotide
  Description of Combined DNA/RNA Molecule: Synthetic oligonucleotide
gccagcauccacgcuuccutt

SEQ ID NO: 1593 - DNA, 21 bp, Artificial Sequence
  Description of Artificial Sequence: Synthetic oligonucleotide
  Description of Combined DNA/RNA Molecule: Synthetic oligonucleotide
agcauccacgcuuccugcutt

SEQ ID NO: 1594 - DNA, 21 bp, Artificial Sequence
  Description of Artificial Sequence: Synthetic oligonucleotide
  Description of Combined DNA/RNA Molecule: Synthetic oligonucleotide
gcauccacgcuuccugcugtt

SEQ ID NO: 1595 - DNA, 21 bp, Artificial Sequence
  Description of Artificial Sequence: Synthetic oligonucleotide
  Description of Combined DNA/RNA Molecule: Synthetic oligonucleotide
uccacgcuuccugcugccatt

SEQ ID NO: 1596 - DNA, 21 bp, Artificial Sequence
  Description of Artificial Sequence: Synthetic oligonucleotide
  Description of Combined DNA/RNA Molecule: Synthetic oligonucleotide
ccacgcuuccugcugccautt

SEQ ID NO: 1597 - DNA, 21 bp, Artificial Sequence
  Description of Artificial Sequence: Synthetic oligonucleotide
  Description of Combined DNA/RNA Molecule: Synthetic oligonucleotide
cacgcuuccugcugccaugtt

SEQ ID NO: 1598 - DNA, 21 bp, Artificial Sequence
  Description of Artificial Sequence: Synthetic oligonucleotide
  Description of Combined DNA/RNA Molecule: Synthetic oligonucleotide
uuccugcugccaugccccatt

SEQ ID NO: 1599 - DNA, 21 bp, Artificial Sequence
  Description of Artificial Sequence: Synthetic oligonucleotide
  Description of Combined DNA/RNA Molecule: Synthetic oligonucleotide
ccaugccccaggucuggaatt

SEQ ID NO: 1600 - DNA, 21 bp, Artificial Sequence
  Description of Artificial Sequence: Synthetic oligonucleotide
  Description of Combined DNA/RNA Molecule: Synthetic oligonucleotide
caugccccaggucuggaautt

SEQ ID NO: 1601 - DNA, 21 bp, Artificial Sequence
  Description of Artificial Sequence: Synthetic oligonucleotide
  Description of Combined DNA/RNA Molecule: Synthetic oligonucleotide
augccccaggucuggaaugtt

SEQ ID NO: 1602 - DNA, 21 bp, Artificial Sequence
  Description of Artificial Sequence: Synthetic oligonucleotide
  Description of Combined DNA/RNA Molecule: Synthetic oligonucleotide
gccccaggucuggaaugcatt

SEQ ID NO: 1603 - DNA, 21 bp, Artificial Sequence
  Description of Artificial Sequence: Synthetic oligonucleotide
  Description of Combined DNA/RNA Molecule: Synthetic oligonucleotide
ccccaggucuggaaugcaatt

SEQ ID NO: 1604 - DNA, 21 bp, Artificial Sequence
  Description of Artificial Sequence: Synthetic oligonucleotide
  Description of Combined DNA/RNA Molecule: Synthetic oligonucleotide
ccaggucuggaaugcaaagtt

SEQ ID NO: 1605 - DNA, 21 bp, Artificial Sequence
  Description of Artificial Sequence: Synthetic oligonucleotide
  Description of Combined DNA/RNA Molecule: Synthetic oligonucleotide
caggucuggaaugcaaagutt

SEQ ID NO: 1606 - DNA, 21 bp, Artificial Sequence
  Description of Artificial Sequence: Synthetic oligonucleotide
  Description of Combined DNA/RNA Molecule: Synthetic oligonucleotide
aggucuggaaugcaaaguctt

SEQ ID NO: 1607 - DNA, 21 bp, Artificial Sequence
  Description of Artificial Sequence: Synthetic oligonucleotide
  Description of Combined DNA/RNA Molecule: Synthetic oligonucleotide
ggucuggaaugcaaagucatt

SEQ ID NO: 1608 - DNA, 21 bp, Artificial Sequence
  Description of Artificial Sequence: Synthetic oligonucleotide
  Description of Combined DNA/RNA Molecule: Synthetic oligonucleotide
gucuggaaugcaaagucaatt

SEQ ID NO: 1609 - DNA, 21 bp, Artificial Sequence
  Description of Artificial Sequence: Synthetic oligonucleotide
  Description of Combined DNA/RNA Molecule: Synthetic oligonucleotide
ucuggaaugcaaagucaagtt

SEQ ID NO: 1610 - DNA, 21 bp, Artificial Sequence
  Description of Artificial Sequence: Synthetic oligonucleotide
  Description of Combined DNA/RNA Molecule: Synthetic oligonucleotide
uggaaugcaaagucaaggatt

SEQ ID NO: 1611 - DNA, 21 bp, Artificial Sequence
  Description of Artificial Sequence: Synthetic oligonucleotide
  Description of Combined DNA/RNA Molecule: Synthetic oligonucleotide
ggaaugcaaagucaaggagtt

SEQ ID NO: 1612 - DNA, 21 bp, Artificial Sequence
  Description of Artificial Sequence: Synthetic oligonucleotide
  Description of Combined DNA/RNA Molecule: Synthetic oligonucleotide
aaugcaaagucaaggagcatt

SEQ ID NO: 1613 - DNA, 21 bp, Artificial Sequence
  Description of Artificial Sequence: Synthetic oligonucleotide
  Description of Combined DNA/RNA Molecule: Synthetic oligonucleotide
augcaaagucaaggagcautt

SEQ ID NO: 1614 - DNA, 21 bp, Artificial Sequence
  Description of Artificial Sequence: Synthetic oligonucleotide
  Description of Combined DNA/RNA Molecule: Synthetic oligonucleotide
ugcaaagucaaggagcaugtt

SEQ ID NO: 1615 - DNA, 21 bp, Artificial Sequence
  Description of Artificial Sequence: Synthetic oligonucleotide
  Description of Combined DNA/RNA Molecule: Synthetic oligonucleotide
caaagucaaggagcauggatt

SEQ ID NO: 1616 - DNA, 21 bp, Artificial Sequence
  Description of Artificial Sequence: Synthetic oligonucleotide
  Description of Combined DNA/RNA Molecule: Synthetic oligonucleotide
aaagucaaggagcauggaatt

SEQ ID NO: 1617 - DNA, 21 bp, Artificial Sequence
  Description of Artificial Sequence: Synthetic oligonucleotide
  Description of Combined DNA/RNA Molecule: Synthetic oligonucleotide
aagucaaggagcauggaautt

SEQ ID NO: 1618 - DNA, 21 bp, Artificial Sequence
  Description of Artificial Sequence: Synthetic oligonucleotide
  Description of Combined DNA/RNA Molecule: Synthetic oligonucleotide
auggaaucccggccccucatt

SEQ ID NO: 1619 - DNA, 21 bp, Artificial Sequence
  Description of Artificial Sequence: Synthetic oligonucleotide
  Description of Combined DNA/RNA Molecule: Synthetic oligonucleotide
acaggcagcaccagcgaagtt

SEQ ID NO: 1620 - DNA, 21 bp, Artificial Sequence
  Description of Artificial Sequence: Synthetic oligonucleotide
  Description of Combined DNA/RNA Molecule: Synthetic oligonucleotide
cagccguugccaucugcugtt

SEQ ID NO: 1621 - DNA, 21 bp, Artificial Sequence
  Description of Artificial Sequence: Synthetic oligonucleotide
  Description of Combined DNA/RNA Molecule: Synthetic oligonucleotide
guugccaucugcugccggatt

SEQ ID NO: 1622 - DNA, 21 bp, Artificial Sequence
  Description of Artificial Sequence: Synthetic oligonucleotide
  Description of Combined DNA/RNA Molecule: Synthetic oligonucleotide
uugccaucugcugccggagtt

SEQ ID NO: 1623 - DNA, 21 bp, Artificial Sequence
  Description of Artificial Sequence: Synthetic oligonucleotide
  Description of Combined DNA/RNA Molecule: Synthetic oligonucleotide
cucccaggagcuccagugatt

SEQ ID NO: 1624 - DNA, 21 bp, Artificial Sequence
  Description of Artificial Sequence: Synthetic oligonucleotide
  Description of Combined DNA/RNA Molecule: Synthetic oligonucleotide
ucccaggagcuccagugactt

SEQ ID NO: 1625 - DNA, 21 bp, Artificial Sequence
  Description of Artificial Sequence: Synthetic oligonucleotide
  Description of Combined DNA/RNA Molecule: Synthetic oligonucleotide
cccaggagcuccagugacatt

SEQ ID NO: 1626 - DNA, 21 bp, Artificial Sequence
  Description of Artificial Sequence: Synthetic oligonucleotide
  Description of Combined DNA/RNA Molecule: Synthetic oligonucleotide
ccaggagcuccagugacagtt

SEQ ID NO: 1627 - DNA, 21 bp, Artificial Sequence
  Description of Artificial Sequence: Synthetic oligonucleotide
  Description of Combined DNA/RNA Molecule: Synthetic oligonucleotide
agcuccagugacagccccatt

SEQ ID NO: 1628 - DNA, 21 bp, Artificial Sequence
  Description of Artificial Sequence: Synthetic oligonucleotide
  Description of Combined DNA/RNA Molecule: Synthetic oligonucleotide
gcuccagugacagccccautt

SEQ ID NO: 1629 - DNA, 21 bp, Artificial Sequence
  Description of Artificial Sequence: Synthetic oligonucleotide
  Description of Combined DNA/RNA Molecule: Synthetic oligonucleotide
cuccagugacagccccauctt

SEQ ID NO: 1630 - DNA, 21 bp, Artificial Sequence
  Description of Artificial Sequence: Synthetic oligonucleotide
  Description of Combined DNA/RNA Molecule: Synthetic oligonucleotide
cagugacagccccaucccatt

SEQ ID NO: 1631 - DNA, 21 bp, Artificial Sequence
  Description of Artificial Sequence: Synthetic oligonucleotide
  Description of Combined DNA/RNA Molecule: Synthetic oligonucleotide
agugacagccccaucccagtt

SEQ ID NO: 1632 - DNA, 21 bp, Artificial Sequence
  Description of Artificial Sequence: Synthetic oligonucleotide
  Description of Combined DNA/RNA Molecule: Synthetic oligonucleotide
ugacagccccaucccaggatt

SEQ ID NO: 1633 - DNA, 21 bp, Artificial Sequence
  Description of Artificial Sequence: Synthetic oligonucleotide
  Description of Combined DNA/RNA Molecule: Synthetic oligonucleotide
gacagccccaucccaggautt

SEQ ID NO: 1634 - DNA, 21 bp, Artificial Sequence
  Description of Artificial Sequence: Synthetic oligonucleotide
  Description of Combined DNA/RNA Molecule: Synthetic oligonucleotide
acagccccaucccaggaugtt

SEQ ID NO: 1635 - DNA, 21 bp, Artificial Sequence
  Description of Artificial Sequence: Synthetic oligonucleotide
  Description of Combined DNA/RNA Molecule: Synthetic oligonucleotide
gggcuggggcugagcuuuatt

SEQ ID NO: 1636 - DNA, 21 bp, Artificial Sequence
  Description of Artificial Sequence: Synthetic oligonucleotide
  Description of Combined DNA/RNA Molecule: Synthetic oligonucleotide
ggcuggggcugagcuuuaatt

SEQ ID NO: 1637 - DNA, 21 bp, Artificial Sequence
  Description of Artificial Sequence: Synthetic oligonucleotide
  Description of Combined DNA/RNA Molecule: Synthetic oligonucleotide
gcuggggcugagcuuuaaatt

SEQ ID NO: 1638 - DNA, 21 bp, Artificial Sequence
  Description of Artificial Sequence: Synthetic oligonucleotide
  Description of Combined DNA/RNA Molecule: Synthetic oligonucleotide
ggcugagcuuuaaaauggutt

SEQ ID NO: 1639 - DNA, 21 bp, Artificial Sequence
  Description of Artificial Sequence: Synthetic oligonucleotide
  Description of Combined DNA/RNA Molecule: Synthetic oligonucleotide
gcugagcuuuaaaaugguutt

SEQ ID NO: 1640 - DNA, 21 bp, Artificial Sequence
  Description of Artificial Sequence: Synthetic oligonucleotide
  Description of Combined DNA/RNA Molecule: Synthetic oligonucleotide
cugagcuuuaaaaugguuctt

SEQ ID NO: 1641 - DNA, 21 bp, Artificial Sequence
  Description of Artificial Sequence: Synthetic oligonucleotide
  Description of Combined DNA/RNA Molecule: Synthetic oligonucleotide
guggaggugccaggaagcutt

SEQ ID NO: 1642 - DNA, 21 bp, Artificial Sequence
  Description of Artificial Sequence: Synthetic oligonucleotide
  Description of Combined DNA/RNA Molecule: Synthetic oligonucleotide
uggaggugccaggaagcuctt

SEQ ID NO: 1643 - DNA, 21 bp, Artificial Sequence
  Description of Artificial Sequence: Synthetic oligonucleotide
  Description of Combined DNA/RNA Molecule: Synthetic oligonucleotide
aggugccaggaagcucccutt

SEQ ID NO: 1644 - DNA, 21 bp, Artificial Sequence
  Description of Artificial Sequence: Synthetic oligonucleotide
  Description of Combined DNA/RNA Molecule: Synthetic oligonucleotide
ucacuguggggcauuucactt

SEQ ID NO: 1645 - DNA, 21 bp, Artificial Sequence
  Description of Artificial Sequence: Synthetic oligonucleotide
  Description of Combined DNA/RNA Molecule: Synthetic oligonucleotide
acuguggggcauuucaccatt

SEQ ID NO: 1646 - DNA, 21 bp, Artificial Sequence
  Description of Artificial Sequence: Synthetic oligonucleotide
  Description of Combined DNA/RNA Molecule: Synthetic oligonucleotide
cuguggggcauuucaccautt

SEQ ID NO: 1647 - DNA, 21 bp, Artificial Sequence
  Description of Artificial Sequence: Synthetic oligonucleotide
  Description of Combined DNA/RNA Molecule: Synthetic oligonucleotide
uguggggcauuucaccauutt

SEQ ID NO: 1648 - DNA, 21 bp, Artificial Sequence
  Description of Artificial Sequence: Synthetic oligonucleotide
  Description of Combined DNA/RNA Molecule: Synthetic oligonucleotide
ugcugccagcugcucccaatt

SEQ ID NO: 1649 - DNA, 21 bp, Artificial Sequence
  Description of Artificial Sequence: Synthetic oligonucleotide
  Description of Combined DNA/RNA Molecule: Synthetic oligonucleotide
cuuuuauugagcucuuguutt

SEQ ID NO: 1650 - DNA, 21 bp, Artificial Sequence
  Description of Artificial Sequence: Synthetic oligonucleotide
  Description of Combined DNA/RNA Molecule: Synthetic oligonucleotide
gucuccaccaaggaggcagtt

SEQ ID NO: 1651 - DNA, 21 bp, Artificial Sequence
  Description of Artificial Sequence: Synthetic oligonucleotide
  Description of Combined DNA/RNA Molecule: Synthetic oligonucleotide
cuccaccaaggaggcaggatt

SEQ ID NO: 1652 - DNA, 21 bp, Artificial Sequence
  Description of Artificial Sequence: Synthetic oligonucleotide
  Description of Combined DNA/RNA Molecule: Synthetic oligonucleotide
uccaccaaggaggcaggautt

SEQ ID NO: 1653 - DNA, 21 bp, Artificial Sequence
  Description of Artificial Sequence: Synthetic oligonucleotide
  Description of Combined DNA/RNA Molecule: Synthetic oligonucleotide
ccaccaaggaggcaggauutt

SEQ ID NO: 1654 - DNA, 21 bp, Artificial Sequence
  Description of Artificial Sequence: Synthetic oligonucleotide
  Description of Combined DNA/RNA Molecule: Synthetic oligonucleotide
accaaggaggcaggauucutt

SEQ ID NO: 1655 - DNA, 21 bp, Artificial Sequence
  Description of Artificial Sequence: Synthetic oligonucleotide
  Description of Combined DNA/RNA Molecule: Synthetic oligonucleotide
ccaaggaggcaggauucuutt

SEQ ID NO: 1656 - DNA, 21 bp, Artificial Sequence
  Description of Artificial Sequence: Synthetic oligonucleotide
  Description of Combined DNA/RNA Molecule: Synthetic oligonucleotide
caaggaggcaggauucuuctt

SEQ ID NO: 1657 - DNA, 21 bp, Artificial Sequence
  Description of Artificial Sequence: Synthetic oligonucleotide
  Description of Combined DNA/RNA Molecule: Synthetic oligonucleotide
ggaggcaggauucuucccatt

SEQ ID NO: 1658 - DNA, 21 bp, Artificial Sequence
  Description of Artificial Sequence: Synthetic oligonucleotide
  Description of Combined DNA/RNA Molecule: Synthetic oligonucleotide
gaggcaggauucuucccautt

SEQ ID NO: 1659 - DNA, 21 bp, Artificial Sequence
  Description of Artificial Sequence: Synthetic oligonucleotide
  Description of Combined DNA/RNA Molecule: Synthetic oligonucleotide
aggcaggauucuucccaugtt

SEQ ID NO: 1660 - DNA, 21 bp, Artificial Sequence
  Description of Artificial Sequence: Synthetic oligonucleotide
  Description of Combined DNA/RNA Molecule: Synthetic oligonucleotide
ugcugauggcccucaucuctt

SEQ ID NO: 1661 - DNA, 21 bp, Artificial Sequence
  Description of Artificial Sequence: Synthetic oligonucleotide
  Description of Combined DNA/RNA Molecule: Synthetic oligonucleotide
cugauggcccucaucuccatt

SEQ ID NO: 1662 - DNA, 21 bp, Artificial Sequence
  Description of Artificial Sequence: Synthetic oligonucleotide
  Description of Combined DNA/RNA Molecule: Synthetic oligonucleotide
ugauggcccucaucuccagtt

SEQ ID NO: 1663 - DNA, 21 bp, Artificial Sequence
  Description of Artificial Sequence: Synthetic oligonucleotide
  Description of Combined DNA/RNA Molecule: Synthetic oligonucleotide
auggcccucaucuccagcutt

SEQ ID NO: 1664 - DNA, 21 bp, Artificial Sequence
  Description of Artificial Sequence: Synthetic oligonucleotide
  Description of Combined DNA/RNA Molecule: Synthetic oligonucleotide
agcuuucuggauggcaucutt

SEQ ID NO: 1665 - DNA, 21 bp, Artificial Sequence
  Description of Artificial Sequence: Synthetic oligonucleotide
  Description of Combined DNA/RNA Molecule: Synthetic oligonucleotide
gcuuucuggauggcaucuatt

SEQ ID NO: 1666 - DNA, 21 bp, Artificial Sequence
  Description of Artificial Sequence: Synthetic oligonucleotide
  Description of Combined DNA/RNA Molecule: Synthetic oligonucleotide
cuuucuggauggcaucuagtt

SEQ ID NO: 1667 - DNA, 21 bp, Artificial Sequence
  Description of Artificial Sequence: Synthetic oligonucleotide
  Description of Combined DNA/RNA Molecule: Synthetic oligonucleotide
cuggauggcaucuagccagtt

SEQ ID NO: 1668 - DNA, 21 bp, Artificial Sequence
  Description of Artificial Sequence: Synthetic oligonucleotide
  Description of Combined DNA/RNA Molecule: Synthetic oligonucleotide
uggauggcaucuagccagatt

SEQ ID NO: 1669 - DNA, 21 bp, Artificial Sequence
  Description of Artificial Sequence: Synthetic oligonucleotide
  Description of Combined DNA/RNA Molecule: Synthetic oligonucleotide
ggauggcaucuagccagagtt

SEQ ID NO: 1670 - DNA, 21 bp, Artificial Sequence
  Description of Artificial Sequence: Synthetic oligonucleotide
  Description of Combined DNA/RNA Molecule: Synthetic oligonucleotide
uggcaucuagccagaggcutt

SEQ ID NO: 1671 - DNA, 21 bp, Artificial Sequence
  Description of Artificial Sequence: Synthetic oligonucleotide
  Description of Combined DNA/RNA Molecule: Synthetic oligonucleotide
ggcaucuagccagaggcugtt

SEQ ID NO: 1672 - DNA, 21 bp, Artificial Sequence
  Description of Artificial Sequence: Synthetic oligonucleotide
  Description of Combined DNA/RNA Molecule: Synthetic oligonucleotide
caucuagccagaggcuggatt

SEQ ID NO: 1673 - DNA, 21 bp, Artificial Sequence
  Description of Artificial Sequence: Synthetic oligonucleotide
  Description of Combined DNA/RNA Molecule: Synthetic oligonucleotide
ucuagccagaggcuggagatt

SEQ ID NO: 1674 - DNA, 21 bp, Artificial Sequence
  Description of Artificial Sequence: Synthetic oligonucleotide
  Description of Combined DNA/RNA Molecule: Synthetic oligonucleotide
cucuaugccaggcugugcutt

SEQ ID NO: 1675 - DNA, 21 bp, Artificial Sequence
  Description of Artificial Sequence: Synthetic oligonucleotide
  Description of Combined DNA/RNA Molecule: Synthetic oligonucleotide
ucuaugccaggcugugcuatt

SEQ ID NO: 1676 - DNA, 21 bp, Artificial Sequence
  Description of Artificial Sequence: Synthetic oligonucleotide
  Description of Combined DNA/RNA Molecule: Synthetic oligonucleotide
ucucagccaacccgcuccatt

SEQ ID NO: 1677 - DNA, 21 bp, Artificial Sequence
  Description of Artificial Sequence: Synthetic oligonucleotide
  Description of Combined DNA/RNA Molecule: Synthetic oligonucleotide
ucagccaacccgcuccacutt

SEQ ID NO: 1678 - DNA, 21 bp, Artificial Sequence
  Description of Artificial Sequence: Synthetic oligonucleotide
  Description of Combined DNA/RNA Molecule: Synthetic oligonucleotide
cagccaacccgcuccacuatt

SEQ ID NO: 1679 - DNA, 21 bp, Artificial Sequence
  Description of Artificial Sequence: Synthetic oligonucleotide
  Description of Combined DNA/RNA Molecule: Synthetic oligonucleotide
agccaacccgcuccacuactt

SEQ ID NO: 1680 - DNA, 21 bp, Artificial Sequence
  Description of Artificial Sequence: Synthetic oligonucleotide
  Description of Combined DNA/RNA Molecule: Synthetic oligonucleotide
ugccugccaagcucacacatt

SEQ ID NO: 1681 - DNA, 21 bp, Artificial Sequence
  Description of Artificial Sequence: Synthetic oligonucleotide
  Description of Combined DNA/RNA Molecule: Synthetic oligonucleotide
gccugccaagcucacacagtt

SEQ ID NO: 1682 - DNA, 21 bp, Artificial Sequence
  Description of Artificial Sequence: Synthetic oligonucleotide
  Description of Combined DNA/RNA Molecule: Synthetic oligonucleotide
cugccaagcucacacagcatt

SEQ ID NO: 1683 - DNA, 21 bp, Artificial Sequence
  Description of Artificial Sequence: Synthetic oligonucleotide
  Description of Combined DNA/RNA Molecule: Synthetic oligonucleotide
ugccaagcucacacagcagtt

SEQ ID NO: 1684 - DNA, 21 bp, Artificial Sequence
  Description of Artificial Sequence: Synthetic oligonucleotide
  Description of Combined DNA/RNA Molecule: Synthetic oligonucleotide
ccaagcucacacagcaggatt

SEQ ID NO: 1685 - DNA, 21 bp, Artificial Sequence
  Description of Artificial Sequence: Synthetic oligonucleotide
  Description of Combined DNA/RNA Molecule: Synthetic oligonucleotide
caagcucacacagcaggaatt

SEQ ID NO: 1686 - DNA, 21 bp, Artificial Sequence
  Description of Artificial Sequence: Synthetic oligonucleotide
  Description of Combined DNA/RNA Molecule: Synthetic oligonucleotide
aagcucacacagcaggaactt

SEQ ID NO: 1687 - DNA, 21 bp, Artificial Sequence
  Description of Artificial Sequence: Synthetic oligonucleotide
  Description of Combined DNA/RNA Molecule: Synthetic oligonucleotide
agcucacacagcaggaacutt

SEQ ID NO: 1688 - DNA, 21 bp, Artificial Sequence
  Description of Artificial Sequence: Synthetic oligonucleotide
  Description of Combined DNA/RNA Molecule: Synthetic oligonucleotide
gcucacacagcaggaacugtt

SEQ ID NO: 1689 - DNA, 21 bp, Artificial Sequence
  Description of Artificial Sequence: Synthetic oligonucleotide
  Description of Combined DNA/RNA Molecule: Synthetic oligonucleotide
cucacacagcaggaacugatt

SEQ ID NO: 1690 - DNA, 21 bp, Artificial Sequence
  Description of Artificial Sequence: Synthetic oligonucleotide
  Description of Combined DNA/RNA Molecule: Synthetic oligonucleotide
ucacacagcaggaacugagtt

SEQ ID NO: 1691 - DNA, 21 bp, Artificial Sequence
  Description of Artificial Sequence: Synthetic oligonucleotide
  Description of Combined DNA/RNA Molecule: Synthetic oligonucleotide
cacagcaggaacugagccatt

SEQ ID NO: 1692 - DNA, 21 bp, Artificial Sequence
  Description of Artificial Sequence: Synthetic oligonucleotide
  Description of Combined DNA/RNA Molecule: Synthetic oligonucleotide
acagcaggaacugagccagtt

SEQ ID NO: 1693 - DNA, 21 bp, Artificial Sequence
  Description of Artificial Sequence: Synthetic oligonucleotide
  Description of Combined DNA/RNA Molecule: Synthetic oligonucleotide
cagcaggaacugagccagatt

SEQ ID NO: 1694 - DNA, 21 bp, Artificial Sequence
  Description of Artificial Sequence: Synthetic oligonucleotide
  Description of Combined DNA/RNA Molecule: Synthetic oligonucleotide
agcaggaacugagccagaatt

SEQ ID NO: 1695 - DNA, 21 bp, Artificial Sequence
  Description of Artificial Sequence: Synthetic oligonucleotide
  Description of Combined DNA/RNA Molecule: Synthetic oligonucleotide
gcaggaacugagccagaaatt

SEQ ID NO: 1696 - DNA, 21 bp, Artificial Sequence
  Description of Artificial Sequence: Synthetic oligonucleotide
  Description of Combined DNA/RNA Molecule: Synthetic oligonucleotide
caggaacugagccagaaactt

SEQ ID NO: 1697 - DNA, 21 bp, Artificial Sequence
  Description of Artificial Sequence: Synthetic oligonucleotide
  Description of Combined DNA/RNA Molecule: Synthetic oligonucleotide
cucugaagccaagccucuutt

SEQ ID NO: 1698 - DNA, 21 bp, Artificial Sequence
  Description of Artificial Sequence: Synthetic oligonucleotide
  Description of Combined DNA/RNA Molecule: Synthetic oligonucleotide
ucugaagccaagccucuuctt

SEQ ID NO: 1699 - DNA, 21 bp, Artificial Sequence
  Description of Artificial Sequence: Synthetic oligonucleotide
  Description of Combined DNA/RNA Molecule: Synthetic oligonucleotide
cugaagccaagccucuucutt

SEQ ID NO: 1700 - DNA, 21 bp, Artificial Sequence
  Description of Artificial Sequence: Synthetic oligonucleotide
  Description of Combined DNA/RNA Molecule: Synthetic oligonucleotide
ugaagccaagccucuucuutt

SEQ ID NO: 1701 - DNA, 21 bp, Artificial Sequence
  Description of Artificial Sequence: Synthetic oligonucleotide
  Description of Combined DNA/RNA Molecule: Synthetic oligonucleotide
gaagccaagccucuucuuatt

SEQ ID NO: 1702 - DNA, 21 bp, Artificial Sequence
  Description of Artificial Sequence: Synthetic oligonucleotide
  Description of Combined DNA/RNA Molecule: Synthetic oligonucleotide
aagccaagccucuucuuactt

SEQ ID NO: 1703 - DNA, 21 bp, Artificial Sequence
  Description of Artificial Sequence: Synthetic oligonucleotide
  Description of Combined DNA/RNA Molecule: Synthetic oligonucleotide
gccaagccucuucuuacuutt

SEQ ID NO: 1704 - DNA, 21 bp, Artificial Sequence
  Description of Artificial Sequence: Synthetic oligonucleotide
  Description of Combined DNA/RNA Molecule: Synthetic oligonucleotide
gguaacagugaggcugggatt

SEQ ID NO: 1705 - DNA, 21 bp, Artificial Sequence
  Description of Artificial Sequence: Synthetic oligonucleotide
  Description of Combined DNA/RNA Molecule: Synthetic oligonucleotide
guaacagugaggcugggaatt

SEQ ID NO: 1706 - DNA, 21 bp, Artificial Sequence
  Description of Artificial Sequence: Synthetic oligonucleotide
  Description of Combined DNA/RNA Molecule: Synthetic oligonucleotide
uaacagugaggcugggaagtt

SEQ ID NO: 1707 - DNA, 21 bp, Artificial Sequence
  Description of Artificial Sequence: Synthetic oligonucleotide
  Description of Combined DNA/RNA Molecule: Synthetic oligonucleotide
agugaggcugggaaggggatt

SEQ ID NO: 1708 - DNA, 21 bp, Artificial Sequence
  Description of Artificial Sequence: Synthetic oligonucleotide
  Description of Combined DNA/RNA Molecule: Synthetic oligonucleotide
gugaggcugggaaggggaatt

SEQ ID NO: 1709 - DNA, 21 bp, Artificial Sequence
  Description of Artificial Sequence: Synthetic oligonucleotide
  Description of Combined DNA/RNA Molecule: Synthetic oligonucleotide
ugaggcugggaaggggaactt

SEQ ID NO: 1710 - DNA, 21 bp, Artificial Sequence
  Description of Artificial Sequence: Synthetic oligonucleotide
  Description of Combined DNA/RNA Molecule: Synthetic oligonucleotide
gaggcugggaaggggaacatt

SEQ ID NO: 1711 - DNA, 21 bp, Artificial Sequence
  Description of Artificial Sequence: Synthetic oligonucleotide
  Description of Combined DNA/RNA Molecule: Synthetic oligonucleotide
aggcugggaaggggaacactt

SEQ ID NO: 1712 - DNA, 21 bp, Artificial Sequence
  Description of Artificial Sequence: Synthetic oligonucleotide
  Description of Combined DNA/RNA Molecule: Synthetic oligonucleotide
ggcugggaaggggaacacatt

SEQ ID NO: 1713 - DNA, 21 bp, Artificial Sequence
  Description of Artificial Sequence: Synthetic oligonucleotide
  Description of Combined DNA/RNA Molecule: Synthetic oligonucleotide
gcugggaaggggaacacagtt

SEQ ID NO: 1714 - DNA, 21 bp, Artificial Sequence
  Description of Artificial Sequence: Synthetic oligonucleotide
  Description of Combined DNA/RNA Molecule: Synthetic oligonucleotide
cugggaaggggaacacagatt

SEQ ID NO: 1715 - DNA, 21 bp, Artificial Sequence
  Description of Artificial Sequence: Synthetic oligonucleotide
  Description of Combined DNA/RNA Molecule: Synthetic oligonucleotide
ugggaaggggaacacagactt

SEQ ID NO: 1716 - DNA, 21 bp, Artificial Sequence
  Description of Artificial Sequence: Synthetic oligonucleotide
  Description of Combined DNA/RNA Molecule: Synthetic oligonucleotide
ggaaggggaacacagaccatt

SEQ ID NO: 1717 - DNA, 21 bp, Artificial Sequence
  Description of Artificial Sequence: Synthetic oligonucleotide
  Description of Combined DNA/RNA Molecule: Synthetic oligonucleotide
gaaggggaacacagaccagtt

SEQ ID NO: 1718 - DNA, 21 bp, Artificial Sequence
  Description of Artificial Sequence: Synthetic oligonucleotide
  Description of Combined DNA/RNA Molecule: Synthetic oligonucleotide
aggggaacacagaccaggatt

SEQ ID NO: 1719 - DNA, 21 bp, Artificial Sequence
  Description of Artificial Sequence: Synthetic oligonucleotide
  Description of Combined DNA/RNA Molecule: Synthetic oligonucleotide
ggggaacacagaccaggaatt

SEQ ID NO: 1720 - DNA, 21 bp, Artificial Sequence
  Description of Artificial Sequence: Synthetic oligonucleotide
  Description of Combined DNA/RNA Molecule: Synthetic oligonucleotide
gggaacacagaccaggaagtt

SEQ ID NO: 1721 - DNA, 21 bp, Artificial Sequence
  Description of Artificial Sequence: Synthetic oligonucleotide
  Description of Combined DNA/RNA Molecule: Synthetic oligonucleotide
gaacacagaccaggaagcutt

SEQ ID NO: 1722 - DNA, 21 bp, Artificial Sequence
  Description of Artificial Sequence: Synthetic oligonucleotide
  Description of Combined DNA/RNA Molecule: Synthetic oligonucleotide
aacacagaccaggaagcuctt

SEQ ID NO: 1723 - DNA, 21 bp, Artificial Sequence
  Description of Artificial Sequence: Synthetic oligonucleotide
  Description of Combined DNA/RNA Molecule: Synthetic oligonucleotide
acaacugucccuccuugagtt

SEQ ID NO: 1724 - DNA, 21 bp, Artificial Sequence
  Description of Artificial Sequence: Synthetic oligonucleotide
  Description of Combined DNA/RNA Molecule: Synthetic oligonucleotide
aacugucccuccuugagcatt

SEQ ID NO: 1725 - DNA, 21 bp, Artificial Sequence
  Description of Artificial Sequence: Synthetic oligonucleotide
  Description of Combined DNA/RNA Molecule: Synthetic oligonucleotide
ugucccuccuugagcaccatt

SEQ ID NO: 1726 - DNA, 21 bp, Artificial Sequence
  Description of Artificial Sequence: Synthetic oligonucleotide
  Description of Combined DNA/RNA Molecule: Synthetic oligonucleotide
gucccuccuugagcaccagtt

SEQ ID NO: 1727 - DNA, 21 bp, Artificial Sequence
  Description of Artificial Sequence: Synthetic oligonucleotide
  Description of Combined DNA/RNA Molecule: Synthetic oligonucleotide
uccuugagcaccagccccatt

SEQ ID NO: 1728 - DNA, 21 bp, Artificial Sequence
  Description of Artificial Sequence: Synthetic oligonucleotide
  Description of Combined DNA/RNA Molecule: Synthetic oligonucleotide
accagccccacccaagcaatt

SEQ ID NO: 1729 - DNA, 21 bp, Artificial Sequence
  Description of Artificial Sequence: Synthetic oligonucleotide
  Description of Combined DNA/RNA Molecule: Synthetic oligonucleotide
agccccacccaagcaagcatt

SEQ ID NO: 1730 - DNA, 21 bp, Artificial Sequence
  Description of Artificial Sequence: Synthetic oligonucleotide
  Description of Combined DNA/RNA Molecule: Synthetic oligonucleotide
ccccacccaagcaagcagatt

SEQ ID NO: 1731 - DNA, 21 bp, Artificial Sequence
  Description of Artificial Sequence: Synthetic oligonucleotide
  Description of Combined DNA/RNA Molecule: Synthetic oligonucleotide
cccacccaagcaagcagactt

SEQ ID NO: 1732 - DNA, 21 bp, Artificial Sequence
  Description of Artificial Sequence: Synthetic oligonucleotide
  Description of Combined DNA/RNA Molecule: Synthetic oligonucleotide
ccacccaagcaagcagacatt

SEQ ID NO: 1733 - DNA, 21 bp, Artificial Sequence
  Description of Artificial Sequence: Synthetic oligonucleotide
  Description of Combined DNA/RNA Molecule: Synthetic oligonucleotide
cacccaagcaagcagacautt

SEQ ID NO: 1734 - DNA, 21 bp, Artificial Sequence
  Description of Artificial Sequence: Synthetic oligonucleotide
  Description of Combined DNA/RNA Molecule: Synthetic oligonucleotide
acccaagcaagcagacauutt

SEQ ID NO: 1735 - DNA, 21 bp, Artificial Sequence
  Description of Artificial Sequence: Synthetic oligonucleotide
  Description of Combined DNA/RNA Molecule: Synthetic oligonucleotide
cccaagcaagcagacauuutt

SEQ ID NO: 1736 - DNA, 21 bp, Artificial Sequence
  Description of Artificial Sequence: Synthetic oligonucleotide
  Description of Combined DNA/RNA Molecule: Synthetic oligonucleotide
ccaagcaagcagacauuuatt

SEQ ID NO: 1737 - DNA, 21 bp, Artificial Sequence
  Description of Artificial Sequence: Synthetic oligonucleotide
  Description of Combined DNA/RNA Molecule: Synthetic oligonucleotide
caagcaagcagacauuuautt

SEQ ID NO: 1738 - DNA, 21 bp, Artificial Sequence
  Description of Artificial Sequence: Synthetic oligonucleotide
  Description of Combined DNA/RNA Molecule: Synthetic oligonucleotide
aagcaagcagacauuuauctt

SEQ ID NO: 1739 - DNA, 21 bp, Artificial Sequence
  Description of Artificial Sequence: Synthetic oligonucleotide
  Description of Combined DNA/RNA Molecule: Synthetic oligonucleotide
agcaagcagacauuuaucutt

SEQ ID NO: 1740 - DNA, 21 bp, Artificial Sequence
  Description of Artificial Sequence: Synthetic oligonucleotide
  Description of Combined DNA/RNA Molecule: Synthetic oligonucleotide
gcaagcagacauuuaucuutt

SEQ ID NO: 1741 - DNA, 21 bp, Artificial Sequence
  Description of Artificial Sequence: Synthetic oligonucleotide
  Description of Combined DNA/RNA Molecule: Synthetic oligonucleotide
caagcagacauuuaucuuutt

SEQ ID NO: 1742 - DNA, 21 bp, Artificial Sequence
  Description of Artificial Sequence: Synthetic oligonucleotide
  Description of Combined DNA/RNA Molecule: Synthetic oligonucleotide
aagcagacauuuaucuuuutt

SEQ ID NO: 1743 - DNA, 21 bp, Artificial Sequence
  Description of Artificial Sequence: Synthetic oligonucleotide
  Description of Combined DNA/RNA Molecule: Synthetic oligonucleotide
agcagacauuuaucuuuugtt

SEQ ID NO: 1744 - DNA, 21 bp, Artificial Sequence
  Description of Artificial Sequence: Synthetic oligonucleotide
  Description of Combined DNA/RNA Molecule: Synthetic oligonucleotide
agacauuuaucuuuugggutt

SEQ ID NO: 1745 - DNA, 21 bp, Artificial Sequence
  Description of Artificial Sequence: Synthetic oligonucleotide
  Description of Combined DNA/RNA Molecule: Synthetic oligonucleotide
gacauuuaucuuuuggguctt

SEQ ID NO: 1746 - DNA, 21 bp, Artificial Sequence
  Description of Artificial Sequence: Synthetic oligonucleotide
  Description of Combined DNA/RNA Molecule: Synthetic oligonucleotide
aucuuuugggucuguccuctt

SEQ ID NO: 1747 - DNA, 21 bp, Artificial Sequence
  Description of Artificial Sequence: Synthetic oligonucleotide
  Description of Combined DNA/RNA Molecule: Synthetic oligonucleotide
ucuuuugggucuguccucutt

SEQ ID NO: 1748 - DNA, 21 bp, Artificial Sequence
  Description of Artificial Sequence: Synthetic oligonucleotide
  Description of Combined DNA/RNA Molecule: Synthetic oligonucleotide
cuuuugggucuguccucuctt

SEQ ID NO: 1749 - DNA, 21 bp, Artificial Sequence
  Description of Artificial Sequence: Synthetic oligonucleotide
  Description of Combined DNA/RNA Molecule: Synthetic oligonucleotide
uuuugggucuguccucucutt

SEQ ID NO: 1750 - DNA, 21 bp, Artificial Sequence
  Description of Artificial Sequence: Synthetic oligonucleotide
  Description of Combined DNA/RNA Molecule: Synthetic oligonucleotide
uuugggucuguccucucugtt

SEQ ID NO: 1751 - DNA, 21 bp, Artificial Sequence
  Description of Artificial Sequence: Synthetic oligonucleotide
  Description of Combined DNA/RNA Molecule: Synthetic oligonucleotide
uugggucuguccucucugutt

SEQ ID NO: 1752 - DNA, 21 bp, Artificial Sequence
  Description of Artificial Sequence: Synthetic oligonucleotide
  Description of Combined DNA/RNA Molecule: Synthetic oligonucleotide
ugggucuguccucucuguutt

SEQ ID NO: 1753 - DNA, 21 bp, Artificial Sequence
  Description of Artificial Sequence: Synthetic oligonucleotide
  Description of Combined DNA/RNA Molecule: Synthetic oligonucleotide
gggucuguccucucuguugtt

SEQ ID NO: 1754 - DNA, 21 bp, Artificial Sequence
  Description of Artificial Sequence: Synthetic oligonucleotide
  Description of Combined DNA/RNA Molecule: Synthetic oligonucleotide
ucuguccucucuguugccutt

SEQ ID NO: 1755 - DNA, 21 bp, Artificial Sequence
  Description of Artificial Sequence: Synthetic oligonucleotide
  Description of Combined DNA/RNA Molecule: Synthetic oligonucleotide
cuguccucucuguugccuutt

SEQ ID NO: 1756 - DNA, 21 bp, Artificial Sequence
  Description of Artificial Sequence: Synthetic oligonucleotide
  Description of Combined DNA/RNA Molecule: Synthetic oligonucleotide
uguccucucuguugccuuutt

SEQ ID NO: 1757 - DNA, 21 bp, Artificial Sequence
  Description of Artificial Sequence: Synthetic oligonucleotide
  Description of Combined DNA/RNA Molecule: Synthetic oligonucleotide
guccucucuguugccuuuutt

SEQ ID NO: 1758 - DNA, 21 bp, Artificial Sequence
  Description of Artificial Sequence: Synthetic oligonucleotide
  Description of Combined DNA/RNA Molecule: Synthetic oligonucleotide
aagauauuuauucuggguutt

SEQ ID NO: 1759 - DNA, 21 bp, Artificial Sequence
  Description of Artificial Sequence: Synthetic oligonucleotide
  Description of Combined DNA/RNA Molecule: Synthetic oligonucleotide
agauauuuauucuggguuutt

SEQ ID NO: 1760 - DNA, 21 bp, Artificial Sequence
  Description of Artificial Sequence: Synthetic oligonucleotide
  Description of Combined DNA/RNA Molecule: Synthetic oligonucleotide
gauauuuauucuggguuuutt

SEQ ID NO: 1761 - DNA, 21 bp, Artificial Sequence
  Description of Artificial Sequence: Synthetic oligonucleotide
  Description of Combined DNA/RNA Molecule: Synthetic oligonucleotide
cuggcaccuacgugguggutt

SEQ ID NO: 1762 - DNA, 21 bp, Artificial Sequence
  Description of Artificial Sequence: Synthetic oligonucleotide
  Description of Combined DNA/RNA Molecule: Synthetic oligonucleotide
cuacaggcagcaccagcgatt

SEQ ID NO: 1763 - DNA, 21 bp, Artificial Sequence
  Description of Artificial Sequence: Synthetic oligonucleotide
  Description of Combined DNA/RNA Molecule: Synthetic oligonucleotide
cagguggaggugccaggaatt

SEQ ID NO: 1764 - DNA, 21 bp, Artificial Sequence
  Description of Artificial Sequence: Synthetic oligonucleotide
  Description of Combined DNA/RNA Molecule: Synthetic oligonucleotide
cucacuguggggcauuucatt

SEQ ID NO: 1765 - DNA, 21 bp, Artificial Sequence
  Description of Artificial Sequence: Synthetic oligonucleotide
  Description of Combined DNA/RNA Molecule: Synthetic oligonucleotide
cgugccugccaagcucacatt

SEQ ID NO: 1766 - DNA, 21 bp, Artificial Sequence
  Description of Artificial Sequence: Synthetic oligonucleotide
  Description of Combined DNA/RNA Molecule: Synthetic oligonucleotide
ccaagggaagggcacgguutt

SEQ ID NO: 1767 - DNA, 21 bp, Artificial Sequence
  Description of Artificial Sequence: Synthetic oligonucleotide
  Description of Combined DNA/RNA Molecule: Synthetic oligonucleotide
cucuagaccuguuuugcuutt

SEQ ID NO: 1768 - DNA, 21 bp, Artificial Sequence
  Description of Artificial Sequence: Synthetic oligonucleotide
  Description of Combined DNA/RNA Molecule: Synthetic oligonucleotide
cccuagaccuguuuugcuutt

SEQ ID NO: 1769 - DNA, 21 bp, Artificial Sequence
  Description of Artificial Sequence: Synthetic oligonucleotide
  Description of Combined DNA/RNA Molecule: Synthetic oligonucleotide
gguuggcagcuguuuugcatt

SEQ ID NO: 1770 - DNA, 21 bp, Artificial Sequence
  Description of Artificial Sequence: Synthetic oligonucleotide
  Description of Combined DNA/RNA Molecule: Synthetic oligonucleotide
guuggcagcuguuuugcagtt

SEQ ID NO: 1771 - DNA, 21 bp, Artificial Sequence
  Description of Artificial Sequence: Synthetic oligonucleotide
  Description of Combined DNA/RNA Molecule: Synthetic oligonucleotide
uggcagcuguuuugcaggatt

SEQ ID NO: 1772 - DNA, 21 bp, Artificial Sequence
  Description of Artificial Sequence: Synthetic oligonucleotide
  Description of Combined DNA/RNA Molecule: Synthetic oligonucleotide
ggcagcuguuuugcaggactt

SEQ ID NO: 1773 - DNA, 21 bp, Artificial Sequence
  Description of Artificial Sequence: Synthetic oligonucleotide
  Description of Combined DNA/RNA Molecule: Synthetic oligonucleotide
gcagcuguuuugcaggacutt

SEQ ID NO: 1774 - DNA, 21 bp, Artificial Sequence
  Description of Artificial Sequence: Synthetic oligonucleotide
  Description of Combined DNA/RNA Molecule: Synthetic oligonucleotide
ccuacacggauggccacagtt

SEQ ID NO: 1775 - DNA, 21 bp, Artificial Sequence
  Description of Artificial Sequence: Synthetic oligonucleotide
  Description of Combined DNA/RNA Molecule: Synthetic oligonucleotide
gaugaggagcugcugagcutt

SEQ ID NO: 1776 - DNA, 21 bp, Artificial Sequence
  Description of Artificial Sequence: Synthetic oligonucleotide
  Description of Combined DNA/RNA Molecule: Synthetic oligonucleotide
gcugcugagcugcuccagutt

SEQ ID NO: 1777 - DNA, 21 bp, Artificial Sequence
  Description of Artificial Sequence: Synthetic oligonucleotide
  Description of Combined DNA/RNA Molecule: Synthetic oligonucleotide
ugcugagcugcuccaguuutt

SEQ ID NO: 1778 - DNA, 21 bp, Artificial Sequence
  Description of Artificial Sequence: Synthetic oligonucleotide
  Description of Combined DNA/RNA Molecule: Synthetic oligonucleotide
gcugagcugcuccaguuuctt

SEQ ID NO: 1779 - DNA, 21 bp, Artificial Sequence
  Description of Artificial Sequence: Synthetic oligonucleotide
  Description of Combined DNA/RNA Molecule: Synthetic oligonucleotide
cugagcugcuccaguuucutt

SEQ ID NO: 1780 - DNA, 21 bp, Artificial Sequence
  Description of Artificial Sequence: Synthetic oligonucleotide
  Description of Combined DNA/RNA Molecule: Synthetic oligonucleotide
agcugcuccaguuucuccatt

SEQ ID NO: 1781 - DNA, 21 bp, Artificial Sequence
  Description of Artificial Sequence: Synthetic oligonucleotide
  Description of Combined DNA/RNA Molecule: Synthetic oligonucleotide
gcugcuccaguuucuccagtt

SEQ ID NO: 1782 - DNA, 21 bp, Artificial Sequence
  Description of Artificial Sequence: Synthetic oligonucleotide
  Description of Combined DNA/RNA Molecule: Synthetic oligonucleotide
ugcuccaguuucuccaggatt

SEQ ID NO: 1783 - DNA, 21 bp, Artificial Sequence
  Description of Artificial Sequence: Synthetic oligonucleotide
  Description of Combined DNA/RNA Molecule: Synthetic oligonucleotide
cuccaguuucuccaggagutt

SEQ ID NO: 1784 - DNA, 21 bp, Artificial Sequence
  Description of Artificial Sequence: Synthetic oligonucleotide
  Description of Combined DNA/RNA Molecule: Synthetic oligonucleotide
aguuucuccaggagugggatt

SEQ ID NO: 1785 - DNA, 21 bp, Artificial Sequence
  Description of Artificial Sequence: Synthetic oligonucleotide
  Description of Combined DNA/RNA Molecule: Synthetic oligonucleotide
uuucuccaggagugggaagtt

SEQ ID NO: 1786 - DNA, 21 bp, Artificial Sequence
  Description of Artificial Sequence: Synthetic oligonucleotide
  Description of Combined DNA/RNA Molecule: Synthetic oligonucleotide
ggugucuacgccauugccatt

SEQ ID NO: 1787 - DNA, 21 bp, Artificial Sequence
  Description of Artificial Sequence: Synthetic oligonucleotide
  Description of Combined DNA/RNA Molecule: Synthetic oligonucleotide
gugucuacgccauugccagtt

SEQ ID NO: 1788 - DNA, 21 bp, Artificial Sequence
  Description of Artificial Sequence: Synthetic oligonucleotide
  Description of Combined DNA/RNA Molecule: Synthetic oligonucleotide
gucuacgccauugccaggutt

SEQ ID NO: 1789 - DNA, 21 bp, Artificial Sequence
  Description of Artificial Sequence: Synthetic oligonucleotide
  Description of Combined DNA/RNA Molecule: Synthetic oligonucleotide
ucuacgccauugccaggugtt

SEQ ID NO: 1790 - DNA, 21 bp, Artificial Sequence
  Description of Artificial Sequence: Synthetic oligonucleotide
  Description of Combined DNA/RNA Molecule: Synthetic oligonucleotide
acgccauugccaggugcugtt

SEQ ID NO: 1791 - DNA, 21 bp, Artificial Sequence
  Description of Artificial Sequence: Synthetic oligonucleotide
  Description of Combined DNA/RNA Molecule: Synthetic oligonucleotide
cauugccaggugcugccugtt

SEQ ID NO: 1792 - DNA, 21 bp, Artificial Sequence
  Description of Artificial Sequence: Synthetic oligonucleotide
  Description of Combined DNA/RNA Molecule: Synthetic oligonucleotide
caacugcagcguccacacatt

SEQ ID NO: 1793 - DNA, 21 bp, Artificial Sequence
  Description of Artificial Sequence: Synthetic oligonucleotide
  Description of Combined DNA/RNA Molecule: Synthetic oligonucleotide
aacugcagcguccacacagtt

SEQ ID NO: 1794 - DNA, 21 bp, Artificial Sequence
  Description of Artificial Sequence: Synthetic oligonucleotide
  Description of Combined DNA/RNA Molecule: Synthetic oligonucleotide
cugcagcguccacacagcutt

SEQ ID NO: 1795 - DNA, 21 bp, Artificial Sequence
  Description of Artificial Sequence: Synthetic oligonucleotide
  Description of Combined DNA/RNA Molecule: Synthetic oligonucleotide
ugcagcguccacacagcuctt

SEQ ID NO: 1796 - DNA, 21 bp, Artificial Sequence
  Description of Artificial Sequence: Synthetic oligonucleotide
  Description of Combined DNA/RNA Molecule: Synthetic oligonucleotide
cagcguccacacagcuccatt

SEQ ID NO: 1797 - DNA, 21 bp, Artificial Sequence
  Description of Artificial Sequence: Synthetic oligonucleotide
  Description of Combined DNA/RNA Molecule: Synthetic oligonucleotide
agcguccacacagcuccactt

SEQ ID NO: 1798 - DNA, 21 bp, Artificial Sequence
  Description of Artificial Sequence: Synthetic oligonucleotide
  Description of Combined DNA/RNA Molecule: Synthetic oligonucleotide
cguccacacagcuccaccatt

SEQ ID NO: 1799 - DNA, 21 bp, Artificial Sequence
  Description of Artificial Sequence: Synthetic oligonucleotide
  Description of Combined DNA/RNA Molecule: Synthetic oligonucleotide
guccacacagcuccaccagtt

SEQ ID NO: 1800 - DNA, 21 bp, Artificial Sequence
  Description of Artificial Sequence: Synthetic oligonucleotide
  Description of Combined DNA/RNA Molecule: Synthetic oligonucleotide
ccacacagcuccaccagcutt

SEQ ID NO: 1801 - DNA, 21 bp, Artificial Sequence
  Description of Artificial Sequence: Synthetic oligonucleotide
  Description of Combined DNA/RNA Molecule: Synthetic oligonucleotide
cccaggucuggaaugcaaatt

SEQ ID NO: 1802 - DNA, 21 bp, Artificial Sequence
  Description of Artificial Sequence: Synthetic oligonucleotide
  Description of Combined DNA/RNA Molecule: Synthetic oligonucleotide
cagguuggcagcuguuuugtt

SEQ ID NO: 1803 - DNA, 21 bp, Artificial Sequence
  Description of Artificial Sequence: Synthetic oligonucleotide
  Description of Combined DNA/RNA Molecule: Synthetic oligonucleotide
cagcuguuuugcaggacugtt

SEQ ID NO: 1804 - DNA, 21 bp, Artificial Sequence
  Description of Artificial Sequence: Synthetic oligonucleotide
  Description of Combined DNA/RNA Molecule: Synthetic oligonucleotide
agcuguuuugcaggacugutt

SEQ ID NO: 1805 - DNA, 21 bp, Artificial Sequence
  Description of Artificial Sequence: Synthetic oligonucleotide
  Description of Combined DNA/RNA Molecule: Synthetic oligonucleotide
augaggagcugcugagcugtt

SEQ ID NO: 1806 - DNA, 21 bp, Artificial Sequence
  Description of Artificial Sequence: Synthetic oligonucleotide
  Description of Combined DNA/RNA Molecule: Synthetic oligonucleotide
cugcugagcugcuccaguutt

SEQ ID NO: 1807 - DNA, 21 bp, Artificial Sequence
  Description of Artificial Sequence: Synthetic oligonucleotide
  Description of Combined DNA/RNA Molecule: Synthetic oligonucleotide
ugagcugcuccaguuucuctt

SEQ ID NO: 1808 - DNA, 21 bp, Artificial Sequence
  Description of Artificial Sequence: Synthetic oligonucleotide
  Description of Combined DNA/RNA Molecule: Synthetic oligonucleotide
gcuccaguuucuccaggagtt

SEQ ID NO: 1809 - DNA, 21 bp, Artificial Sequence
  Description of Artificial Sequence: Synthetic oligonucleotide
  Description of Combined DNA/RNA Molecule: Synthetic oligonucleotide
uccaguuucuccaggagugtt

SEQ ID NO: 1810 - DNA, 21 bp, Artificial Sequence
  Description of Artificial Sequence: Synthetic oligonucleotide
  Description of Combined DNA/RNA Molecule: Synthetic oligonucleotide
guuucuccaggagugggaatt

SEQ ID NO: 1811 - DNA, 21 bp, Artificial Sequence
  Description of Artificial Sequence: Synthetic oligonucleotide
  Description of Combined DNA/RNA Molecule: Synthetic oligonucleotide
cgggcccacaacgcuuuugtt

SEQ ID NO: 1812 - DNA, 21 bp, Artificial Sequence
  Description of Artificial Sequence: Synthetic oligonucleotide
  Description of Combined DNA/RNA Molecule: Synthetic oligonucleotide
gugagggugucuacgccautt

SEQ ID NO: 1813 - DNA, 21 bp, Artificial Sequence
  Description of Artificial Sequence: Synthetic oligonucleotide
  Description of Combined DNA/RNA Molecule: Synthetic oligonucleotide
ugagggugucuacgccauutt

SEQ ID NO: 1814 - DNA, 21 bp, Artificial Sequence
  Description of Artificial Sequence: Synthetic oligonucleotide
  Description of Combined DNA/RNA Molecule: Synthetic oligonucleotide
uacgccauugccaggugcutt

SEQ ID NO: 1815 - DNA, 21 bp, Artificial Sequence
  Description of Artificial Sequence: Synthetic oligonucleotide
  Description of Combined DNA/RNA Molecule: Synthetic oligonucleotide
ccauugccaggugcugccutt

SEQ ID NO: 1816 - DNA, 21 bp, Artificial Sequence
  Description of Artificial Sequence: Synthetic oligonucleotide
  Description of Combined DNA/RNA Molecule: Synthetic oligonucleotide
uugccaggugcugccugcutt

SEQ ID NO: 1817 - DNA, 21 bp, Artificial Sequence
  Description of Artificial Sequence: Synthetic oligonucleotide
  Description of Combined DNA/RNA Molecule: Synthetic oligonucleotide
ugccaggugcugccugcuatt

SEQ ID NO: 1818 - DNA, 21 bp, Artificial Sequence
  Description of Artificial Sequence: Synthetic oligonucleotide
  Description of Combined DNA/RNA Molecule: Synthetic oligonucleotide
uuuuauugagcucuuguuctt

SEQ ID NO: 1819 - DNA, 21 bp, Artificial Sequence
  Description of Artificial Sequence: Synthetic oligonucleotide
  Description of Combined DNA/RNA Molecule: Synthetic oligonucleotide
uucuagaccuguuuugcuutt

SEQ ID NO: 1820 - DNA, 21 bp, Artificial Sequence
  Description of Artificial Sequence: Synthetic oligonucleotide
  Description of Combined DNA/RNA Molecule: Synthetic oligonucleotide
uucuagaccuguuuugcuutt

SEQ ID NO: 1821 - DNA, 21 bp, Artificial Sequence
  Description of Artificial Sequence: Synthetic oligonucleotide
  Description of Combined DNA/RNA Molecule: Synthetic oligonucleotide
uucuagaccuguuuugcuutt

SEQ ID NO: 1822 - DNA, 21 bp, Artificial Sequence
  Description of Artificial Sequence: Synthetic oligonucleotide
  Description of Combined DNA/RNA Molecule: Synthetic oligonucleotide
uucuagaccuguuuugcuutt

SEQ ID NO: 1823 - DNA, 21 bp, Artificial Sequence
  Description of Artificial Sequence: Synthetic oligonucleotide
  Description of Combined DNA/RNA Molecule: Synthetic oligonucleotide
uucuagaccuguuuugcuutt

SEQ ID NO: 1824 - DNA, 21 bp, Artificial Sequence
  Description of Artificial Sequence: Synthetic oligonucleotide
  Description of Combined DNA/RNA Molecule: Synthetic oligonucleotide
uucuagaccuguuuugcuutt

SEQ ID NO: 1825 - DNA, 21 bp, Artificial Sequence
  Description of Artificial Sequence: Synthetic oligonucleotide
  Description of Combined DNA/RNA Molecule: Synthetic oligonucleotide
uucuagaccuguuuugcuutt

SEQ ID NO: 1826 - DNA, 21 bp, Artificial Sequence
  Description of Artificial Sequence: Synthetic oligonucleotide
  Description of Combined DNA/RNA Molecule: Synthetic oligonucleotide
  modified_base (10)..(10): 2,4 difluoro toluene
cucuagaccnguuuugcuutt

SEQ ID NO: 1827 - DNA, 21 bp, Artificial Sequence
  Description of Artificial Sequence: Synthetic oligonucleotide
  Description of Combined DNA/RNA Molecule: Synthetic oligonucleotide
uucuagaccuguuuugcuatt

SEQ ID NO: 1828 - DNA, 21 bp, Artificial Sequence
  Description of Artificial Sequence: Synthetic oligonucleotide
  Description of Combined DNA/RNA Molecule: Synthetic oligonucleotide
uucuagaccaguuuugcuatt

SEQ ID NO: 1829 - DNA, 21 bp, Artificial Sequence
  Description of Artificial Sequence: Synthetic oligonucleotide
  Description of Combined DNA/RNA Molecule: Synthetic oligonucleotide
  modified_base (10)..(10): 2,4 difluoro toluene
uucuagaccnguuuugcuatt

SEQ ID NO: 1830 - DNA, 21 bp, Artificial Sequence
  Description of Artificial Sequence: Synthetic oligonucleotide
  Description of Combined DNA/RNA Molecule: Synthetic oligonucleotide
  modified_base (10)..(10): 2,4 difluoro toluene
gucuagaccnguuuugcuatt

SEQ ID NO: 1831 - DNA, 21 bp, Artificial Sequence
  Description of Artificial Sequence: Synthetic oligonucleotide
  Description of Combined DNA/RNA Molecule: Synthetic oligonucleotide
gaguccuccucgauguagutt

SEQ ID NO: 1832 - DNA, 21 bp, Artificial Sequence
  Description of Artificial Sequence: Synthetic oligonucleotide
  Description of Combined DNA/RNA Molecule: Synthetic oligonucleotide
aggaguccuccucgauguatt

SEQ ID NO: 1833 - DNA, 21 bp, Artificial Sequence
  Description of Artificial Sequence: Synthetic oligonucleotide
  Description of Combined DNA/RNA Molecule: Synthetic oligonucleotide
gaggaguccuccucgaugutt

SEQ ID NO: 1834 - DNA, 21 bp, Artificial Sequence
  Description of Artificial Sequence: Synthetic oligonucleotide
  Description of Combined DNA/RNA Molecule: Synthetic oligonucleotide
agaggaguccuccucgaugtt

SEQ ID NO: 1835 - DNA, 21 bp, Artificial Sequence
  Description of Artificial Sequence: Synthetic oligonucleotide
  Description of Combined DNA/RNA Molecule: Synthetic oligonucleotide
acagaggaguccuccucgatt

SEQ ID NO: 1836 - DNA, 21 bp, Artificial Sequence
  Description of Artificial Sequence: Synthetic oligonucleotide
  Description of Combined DNA/RNA Molecule: Synthetic oligonucleotide
gacagaggaguccuccucgtt

SEQ ID NO: 1837 - DNA, 21 bp, Artificial Sequence
  Description of Artificial Sequence: Synthetic oligonucleotide
  Description of Combined DNA/RNA Molecule: Synthetic oligonucleotide
agacagaggaguccuccuctt

SEQ ID NO: 1838 - DNA, 21 bp, Artificial Sequence
  Description of Artificial Sequence: Synthetic oligonucleotide
  Description of Combined DNA/RNA Molecule: Synthetic oligonucleotide
aagacagaggaguccuccutt

SEQ ID NO: 1839 - DNA, 21 bp, Artificial Sequence
  Description of Artificial Sequence: Synthetic oligonucleotide
  Description of Combined DNA/RNA Molecule: Synthetic oligonucleotide
uacaccuccaccaggcugctt

SEQ ID NO: 1840 - DNA, 21 bp, Artificial Sequence
  Description of Artificial Sequence: Synthetic oligonucleotide
  Description of Combined DNA/RNA Molecule: Synthetic oligonucleotide
auacaccuccaccaggcugtt

SEQ ID NO: 1841 - DNA, 21 bp, Artificial Sequence
  Description of Artificial Sequence: Synthetic oligonucleotide
  Description of Combined DNA/RNA Molecule: Synthetic oligonucleotide
gauacaccuccaccaggcutt

SEQ ID NO: 1842 - DNA, 21 bp, Artificial Sequence
  Description of Artificial Sequence: Synthetic oligonucleotide
  Description of Combined DNA/RNA Molecule: Synthetic oligonucleotide
agauacaccuccaccaggctt

SEQ ID NO: 1843 - DNA, 21 bp, Artificial Sequence
  Description of Artificial Sequence: Synthetic oligonucleotide
  Description of Combined DNA/RNA Molecule: Synthetic oligonucleotide
cuaggagauacaccuccactt

SEQ ID NO: 1844 - DNA, 21 bp, Artificial Sequence
  Description of Artificial Sequence: Synthetic oligonucleotide
  Description of Combined DNA/RNA Molecule: Synthetic oligonucleotide
ucuaggagauacaccuccatt

SEQ ID NO: 1845 - DNA, 21 bp, Artificial Sequence
  Description of Artificial Sequence: Synthetic oligonucleotide
  Description of Combined DNA/RNA Molecule: Synthetic oligonucleotide
ugucuaggagauacaccuctt

SEQ ID NO: 1846 - DNA, 21 bp, Artificial Sequence
  Description of Artificial Sequence: Synthetic oligonucleotide
  Description of Combined DNA/RNA Molecule: Synthetic oligonucleotide
uggugucuaggagauacactt

SEQ ID NO: 1847 - DNA, 21 bp, Artificial Sequence
  Description of Artificial Sequence: Synthetic oligonucleotide
  Description of Combined DNA/RNA Molecule: Synthetic oligonucleotide
ugcuggugucuaggagauatt

SEQ ID NO: 1848 - DNA, 21 bp, Artificial Sequence
  Description of Artificial Sequence: Synthetic oligonucleotide
  Description of Combined DNA/RNA Molecule: Synthetic oligonucleotide
augcuggugucuaggagautt

SEQ ID NO: 1849 - DNA, 21 bp, Artificial Sequence
  Description of Artificial Sequence: Synthetic oligonucleotide
  Description of Combined DNA/RNA Molecule: Synthetic oligonucleotide
ucuguaugcuggugucuagtt

SEQ ID NO: 1850 - DNA, 21 bp, Artificial Sequence
  Description of Artificial Sequence: Synthetic oligonucleotide
  Description of Combined DNA/RNA Molecule: Synthetic oligonucleotide
cucuguaugcuggugucuatt

SEQ ID NO: 1851 - DNA, 21 bp, Artificial Sequence
  Description of Artificial Sequence: Synthetic oligonucleotide
  Description of Combined DNA/RNA Molecule: Synthetic oligonucleotide
acucuguaugcuggugucutt

SEQ ID NO: 1852 - DNA, 21 bp, Artificial Sequence
  Description of Artificial Sequence: Synthetic oligonucleotide
  Description of Combined DNA/RNA Molecule: Synthetic oligonucleotide
ucacucuguaugcuggugutt

SEQ ID NO: 1853 - DNA, 21 bp, Artificial Sequence
  Description of Artificial Sequence: Synthetic oligonucleotide
  Description of Combined DNA/RNA Molecule: Synthetic oligonucleotide
gucacucuguaugcuggugtt

SEQ ID NO: 1854 - DNA, 21 bp, Artificial Sequence
  Description of Artificial Sequence: Synthetic oligonucleotide
  Description of Combined DNA/RNA Molecule: Synthetic oligonucleotide
uggucacucuguaugcuggtt

SEQ ID NO: 1855 - DNA, 21 bp, Artificial Sequence
  Description of Artificial Sequence: Synthetic oligonucleotide
  Description of Combined DNA/RNA Molecule: Synthetic oligonucleotide
guggucacucuguaugcugtt

SEQ ID NO: 1856 - DNA, 21 bp, Artificial Sequence
  Description of Artificial Sequence: Synthetic oligonucleotide
  Description of Combined DNA/RNA Molecule: Synthetic oligonucleotide
ucccgguggucacucuguatt

SEQ ID NO: 1857 - DNA, 21 bp, Artificial Sequence
  Description of Artificial Sequence: Synthetic oligonucleotide
  Description of Combined DNA/RNA Molecule: Synthetic oligonucleotide
uucccgguggucacucugutt

SEQ ID NO: 1858 - DNA, 21 bp, Artificial Sequence
  Description of Artificial Sequence: Synthetic oligonucleotide
  Description of Combined DNA/RNA Molecule: Synthetic oligonucleotide
uuucccgguggucacucugtt

SEQ ID NO: 1859 - DNA, 21 bp, Artificial Sequence
  Description of Artificial Sequence: Synthetic oligonucleotide
  Description of Combined DNA/RNA Molecule: Synthetic oligonucleotide
cucgauuucccgguggucatt

SEQ ID NO: 1860 - DNA, 21 bp, Artificial Sequence
  Description of Artificial Sequence: Synthetic oligonucleotide
  Description of Combined DNA/RNA Molecule: Synthetic oligonucleotide
ugcccucgauuucccggugtt

SEQ ID NO: 1861 - DNA, 21 bp, Artificial Sequence
  Description of Artificial Sequence: Synthetic oligonucleotide
  Description of Combined DNA/RNA Molecule: Synthetic oligonucleotide
cugcccucgauuucccggutt

SEQ ID NO: 1862 - DNA, 21 bp, Artificial Sequence
  Description of Artificial Sequence: Synthetic oligonucleotide
  Description of Combined DNA/RNA Molecule: Synthetic oligonucleotide
acccugcccucgauuuccctt

SEQ ID NO: 1863 - DNA, 21 bp, Artificial Sequence
  Description of Artificial Sequence: Synthetic oligonucleotide
  Description of Combined DNA/RNA Molecule: Synthetic oligonucleotide
gacccugcccucgauuucctt

SEQ ID NO: 1864 - DNA, 21 bp, Artificial Sequence
  Description of Artificial Sequence: Synthetic oligonucleotide
  Description of Combined DNA/RNA Molecule: Synthetic oligonucleotide
ugacccugcccucgauuuctt

SEQ ID NO: 1865 - DNA, 21 bp, Artificial Sequence
  Description of Artificial Sequence: Synthetic oligonucleotide
  Description of Combined DNA/RNA Molecule: Synthetic oligonucleotide
caugacccugcccucgauutt

SEQ ID NO: 1866 - DNA, 21 bp, Artificial Sequence
  Description of Artificial Sequence: Synthetic oligonucleotide
  Description of Combined DNA/RNA Molecule: Synthetic oligonucleotide
accaugacccugcccucgatt

SEQ ID NO: 1867 - DNA, 21 bp, Artificial Sequence
  Description of Artificial Sequence: Synthetic oligonucleotide
  Description of Combined DNA/RNA Molecule: Synthetic oligonucleotide
gugaccaugacccugcccutt

SEQ ID NO: 1868 - DNA, 21 bp, Artificial Sequence
  Description of Artificial Sequence: Synthetic oligonucleotide
  Description of Combined DNA/RNA Molecule: Synthetic oligonucleotide
ucggugaccaugacccugctt

SEQ ID NO: 1869 - DNA, 21 bp, Artificial Sequence
  Description of Artificial Sequence: Synthetic oligonucleotide
  Description of Combined DNA/RNA Molecule: Synthetic oligonucleotide
aagucggugaccaugaccctt

SEQ ID NO: 1870 - DNA, 21 bp, Artificial Sequence
  Description of Artificial Sequence: Synthetic oligonucleotide
  Description of Combined DNA/RNA Molecule: Synthetic oligonucleotide
gaagucggugaccaugacctt

SEQ ID NO: 1871 - DNA, 21 bp, Artificial Sequence
  Description of Artificial Sequence: Synthetic oligonucleotide
  Description of Combined DNA/RNA Molecule: Synthetic oligonucleotide
ucgaagucggugaccaugatt

SEQ ID NO: 1872 - DNA, 21 bp, Artificial Sequence
  Description of Artificial Sequence: Synthetic oligonucleotide
  Description of Combined DNA/RNA Molecule: Synthetic oligonucleotide
cucgaagucggugaccaugtt

SEQ ID NO: 1873 - DNA, 21 bp, Artificial Sequence
  Description of Artificial Sequence: Synthetic oligonucleotide
  Description of Combined DNA/RNA Molecule: Synthetic oligonucleotide
ugucuguggaagcgggucctt

SEQ ID NO: 1874 - DNA, 21 bp, Artificial Sequence
  Description of Artificial Sequence: Synthetic oligonucleotide
  Description of Combined DNA/RNA Molecule: Synthetic oligonucleotide
cugucuguggaagcggguctt

SEQ ID NO: 1875 - DNA, 21 bp, Artificial Sequence
  Description of Artificial Sequence: Synthetic oligonucleotide
  Description of Combined DNA/RNA Molecule: Synthetic oligonucleotide
uggccugucuguggaagcgtt

SEQ ID NO: 1876 - DNA, 21 bp, Artificial Sequence
  Description of Artificial Sequence: Synthetic oligonucleotide
  Description of Combined DNA/RNA Molecule: Synthetic oligonucleotide
cuggccugucuguggaagctt

SEQ ID NO: 1877 - DNA, 21 bp, Artificial Sequence
  Description of Artificial Sequence: Synthetic oligonucleotide
  Description of Combined DNA/RNA Molecule: Synthetic oligonucleotide
ugcuggccugucuguggaatt

SEQ ID NO: 1878 - DNA, 21 bp, Artificial Sequence
  Description of Artificial Sequence: Synthetic oligonucleotide
  Description of Combined DNA/RNA Molecule: Synthetic oligonucleotide
uugcuggccugucuguggatt

SEQ ID NO: 1879 - DNA, 21 bp, Artificial Sequence
  Description of Artificial Sequence: Synthetic oligonucleotide
  Description of Combined DNA/RNA Molecule: Synthetic oligonucleotide
cuugcuggccugucuguggtt

SEQ ID NO: 1880 - DNA, 21 bp, Artificial Sequence
  Description of Artificial Sequence: Synthetic oligonucleotide
  Description of Combined DNA/RNA Molecule: Synthetic oligonucleotide
acuugcuggccugucugugtt

SEQ ID NO: 1881 - DNA, 21 bp, Artificial Sequence
  Description of Artificial Sequence: Synthetic oligonucleotide
  Description of Combined DNA/RNA Molecule: Synthetic oligonucleotide
cacuugcuggccugucugutt

SEQ ID NO: 1882 - DNA, 21 bp, Artificial Sequence
  Description of Artificial Sequence: Synthetic oligonucleotide
  Description of Combined DNA/RNA Molecule: Synthetic oligonucleotide
acacuugcuggccugucugtt

SEQ ID NO: 1883 - DNA, 21 bp, Artificial Sequence
  Description of Artificial Sequence: Synthetic oligonucleotide
  Description of Combined DNA/RNA Molecule: Synthetic oligonucleotide
cacacuugcuggccugucutt

SEQ ID NO: 1884 - DNA, 21 bp, Artificial Sequence
  Description of Artificial Sequence: Synthetic oligonucleotide
  Description of Combined DNA/RNA Molecule: Synthetic oligonucleotide
ucacacuugcuggccuguctt

SEQ ID NO: 1885 - DNA, 21 bp, Artificial Sequence
  Description of Artificial Sequence: Synthetic oligonucleotide
  Description of Combined DNA/RNA Molecule: Synthetic oligonucleotide
gucacacuugcuggccugutt

SEQ ID NO: 1886 - DNA, 21 bp, Artificial Sequence
  Description of Artificial Sequence: Synthetic oligonucleotide
  Description of Combined DNA/RNA Molecule: Synthetic oligonucleotide
ugucacacuugcuggccugtt

SEQ ID NO: 1887 - DNA, 21 bp, Artificial Sequence
  Description of Artificial Sequence: Synthetic oligonucleotide
  Description of Combined DNA/RNA Molecule: Synthetic oligonucleotide
cugucacacuugcuggccutt

SEQ ID NO: 1888 - DNA, 21 bp, Artificial Sequence
  Description of Artificial Sequence: Synthetic oligonucleotide
  Description of Combined DNA/RNA Molecule: Synthetic oligonucleotide
aguugagcacgcgcaggcutt

SEQ ID NO: 1889 - DNA, 21 bp, Artificial Sequence
  Description of Artificial Sequence: Synthetic oligonucleotide
  Description of Combined DNA/RNA Molecule: Synthetic oligonucleotide
uuggcaguugagcacgcgctt

SEQ ID NO: 1890 - DNA, 21 bp, Artificial Sequence
  Description of Artificial Sequence: Synthetic oligonucleotide
  Description of Combined DNA/RNA Molecule: Synthetic oligonucleotide
ucccuuggcaguugagcactt

SEQ ID NO: 1891 - DNA, 21 bp, Artificial Sequence
  Description of Artificial Sequence: Synthetic oligonucleotide
  Description of Combined DNA/RNA Molecule: Synthetic oligonucleotide
uucccuuggcaguugagcatt

SEQ ID NO: 1892 - DNA, 21 bp, Artificial Sequence
  Description of Artificial Sequence: Synthetic oligonucleotide
  Description of Combined DNA/RNA Molecule: Synthetic oligonucleotide
cuucccuuggcaguugagctt

SEQ ID NO: 1893 - DNA, 21 bp, Artificial Sequence
  Description of Artificial Sequence: Synthetic oligonucleotide
  Description of Combined DNA/RNA Molecule: Synthetic oligonucleotide
ugcccuucccuuggcaguutt

SEQ ID NO: 1894 - DNA, 21 bp, Artificial Sequence
  Description of Artificial Sequence: Synthetic oligonucleotide
  Description of Combined DNA/RNA Molecule: Synthetic oligonucleotide
gugcccuucccuuggcagutt

SEQ ID NO: 1895 - DNA, 21 bp, Artificial Sequence
  Description of Artificial Sequence: Synthetic oligonucleotide
  Description of Combined DNA/RNA Molecule: Synthetic oligonucleotide
cuccaggccuaugagggugtt

SEQ ID NO: 1896 - DNA, 21 bp, Artificial Sequence
  Description of Artificial Sequence: Synthetic oligonucleotide
  Description of Combined DNA/RNA Molecule: Synthetic oligonucleotide
acuccaggccuaugagggutt

SEQ ID NO: 1897 - DNA, 21 bp, Artificial Sequence
  Description of Artificial Sequence: Synthetic oligonucleotide
  Description of Combined DNA/RNA Molecule: Synthetic oligonucleotide
aacuccaggccuaugagggtt

SEQ ID NO: 1898 - DNA, 21 bp, Artificial Sequence
  Description of Artificial Sequence: Synthetic oligonucleotide
  Description of Combined DNA/RNA Molecule: Synthetic oligonucleotide
aaacuccaggccuaugaggtt

SEQ ID NO: 1899 - DNA, 21 bp, Artificial Sequence
  Description of Artificial Sequence: Synthetic oligonucleotide
  Description of Combined DNA/RNA Molecule: Synthetic oligonucleotide
uaaacuccaggccuaugagtt

SEQ ID NO: 1900 - DNA, 21 bp, Artificial Sequence
  Description of Artificial Sequence: Synthetic oligonucleotide
  Description of Combined DNA/RNA Molecule: Synthetic oligonucleotide
uuuccgaauaaacuccaggtt

SEQ ID NO: 1901 - DNA, 21 bp, Artificial Sequence
  Description of Artificial Sequence: Synthetic oligonucleotide
  Description of Combined DNA/RNA Molecule: Synthetic oligonucleotide
cuuuuccgaauaaacuccatt

SEQ ID NO: 1902 - DNA, 21 bp, Artificial Sequence
  Description of Artificial Sequence: Synthetic oligonucleotide
  Description of Combined DNA/RNA Molecule: Synthetic oligonucleotide
uggcuuuuccgaauaaacutt

SEQ ID NO: 1903 - DNA, 21 bp, Artificial Sequence
  Description of Artificial Sequence: Synthetic oligonucleotide
  Description of Combined DNA/RNA Molecule: Synthetic oligonucleotide
cuggcuuuuccgaauaaactt

SEQ ID NO: 1904 - DNA, 21 bp, Artificial Sequence
  Description of Artificial Sequence: Synthetic oligonucleotide
  Description of Combined DNA/RNA Molecule: Synthetic oligonucleotide
cagcuggcuuuuccgaauatt

SEQ ID NO: 1905 - DNA, 21 bp, Artificial Sequence
  Description of Artificial Sequence: Synthetic oligonucleotide
  Description of Combined DNA/RNA Molecule: Synthetic oligonucleotide
accagcuggcuuuuccgaatt

SEQ ID NO: 1906 - DNA, 21 bp, Artificial Sequence
  Description of Artificial Sequence: Synthetic oligonucleotide
  Description of Combined DNA/RNA Molecule: Synthetic oligonucleotide
gaccagcuggcuuuuccgatt

SEQ ID NO: 1907 - DNA, 21 bp, Artificial Sequence
  Description of Artificial Sequence: Synthetic oligonucleotide
  Description of Combined DNA/RNA Molecule: Synthetic oligonucleotide
uggaccagcuggcuuuucctt

SEQ ID NO: 1908 - DNA, 21 bp, Artificial Sequence
  Description of Artificial Sequence: Synthetic oligonucleotide
  Description of Combined DNA/RNA Molecule: Synthetic oligonucleotide
cuggaccagcuggcuuuuctt

SEQ ID NO: 1909 - DNA, 21 bp, Artificial Sequence
  Description of Artificial Sequence: Synthetic oligonucleotide
  Description of Combined DNA/RNA Molecule: Synthetic oligonucleotide
aaguugccggcagcggugatt

SEQ ID NO: 1910 - DNA, 21 bp, Artificial Sequence
  Description of Artificial Sequence: Synthetic oligonucleotide
  Description of Combined DNA/RNA Molecule: Synthetic oligonucleotide
aggcaucgucccggaaguutt

SEQ ID NO: 1911 - DNA, 21 bp, Artificial Sequence
  Description of Artificial Sequence: Synthetic oligonucleotide
  Description of Combined DNA/RNA Molecule: Synthetic oligonucleotide
caggcaucgucccggaagutt

SEQ ID NO: 1912 - DNA, 21 bp, Artificial Sequence
  Description of Artificial Sequence: Synthetic oligonucleotide
  Description of Combined DNA/RNA Molecule: Synthetic oligonucleotide
uagaggcaggcaucguccctt

SEQ ID NO: 1913 - DNA, 21 bp, Artificial Sequence
  Description of Artificial Sequence: Synthetic oligonucleotide
  Description of Combined DNA/RNA Molecule: Synthetic oligonucleotide
aguagaggcaggcaucguctt

SEQ ID NO: 1914 - DNA, 21 bp, Artificial Sequence
  Description of Artificial Sequence: Synthetic oligonucleotide
  Description of Combined DNA/RNA Molecule: Synthetic oligonucleotide
gaguagaggcaggcaucgutt

SEQ ID NO: 1915 - DNA, 21 bp, Artificial Sequence
  Description of Artificial Sequence: Synthetic oligonucleotide
  Description of Combined DNA/RNA Molecule: Synthetic oligonucleotide
caacugugaugaccucgggtt

SEQ ID NO: 1916 - DNA, 21 bp, Artificial Sequence
  Description of Artificial Sequence: Synthetic oligonucleotide
  Description of Combined DNA/RNA Molecule: Synthetic oligonucleotide
uggccccaacugugaugactt

SEQ ID NO: 1917 - DNA, 21 bp, Artificial Sequence
  Description of Artificial Sequence: Synthetic oligonucleotide
  Description of Combined DNA/RNA Molecule: Synthetic oligonucleotide
guggccccaacugugaugatt

SEQ ID NO: 1918 - DNA, 21 bp, Artificial Sequence
  Description of Artificial Sequence: Synthetic oligonucleotide
  Description of Combined DNA/RNA Molecule: Synthetic oligonucleotide
ugguggccccaacugugautt

SEQ ID NO: 1919 - DNA, 21 bp, Artificial Sequence
  Description of Artificial Sequence: Synthetic oligonucleotide
  Description of Combined DNA/RNA Molecule: Synthetic oligonucleotide
uugguggccccaacugugatt

SEQ ID NO: 1920 - DNA, 21 bp, Artificial Sequence
  Description of Artificial Sequence: Synthetic oligonucleotide
  Description of Combined DNA/RNA Molecule: Synthetic oligonucleotide
auugguggccccaacugugtt

SEQ ID NO: 1921 - DNA, 21 bp, Artificial Sequence
  Description of Artificial Sequence: Synthetic oligonucleotide
  Description of Combined DNA/RNA Molecule: Synthetic oligonucleotide
cauugguggccccaacugutt

SEQ ID NO: 1922 - DNA, 21 bp, Artificial Sequence
  Description of Artificial Sequence: Synthetic oligonucleotide
  Description of Combined DNA/RNA Molecule: Synthetic oligonucleotide
ugggcauugguggccccaatt

SEQ ID NO: 1923 - DNA, 21 bp, Artificial Sequence
  Description of Artificial Sequence: Synthetic oligonucleotide
  Description of Combined DNA/RNA Molecule: Synthetic oligonucleotide
aaaguccccagggucaccgtt

SEQ ID NO: 1924 - DNA, 21 bp, Artificial Sequence
  Description of Artificial Sequence: Synthetic oligonucleotide
  Description of Combined DNA/RNA Molecule: Synthetic oligonucleotide
caaaguccccagggucacctt

SEQ ID NO: 1925 - DNA, 21 bp, Artificial Sequence
  Description of Artificial Sequence: Synthetic oligonucleotide
  Description of Combined DNA/RNA Molecule: Synthetic oligonucleotide
aguugguccccaaaguccctt

SEQ ID NO: 1926 - DNA, 21 bp, Artificial Sequence
  Description of Artificial Sequence: Synthetic oligonucleotide
  Description of Combined DNA/RNA Molecule: Synthetic oligonucleotide
aaguugguccccaaagucctt

SEQ ID NO: 1927 - DNA, 21 bp, Artificial Sequence
  Description of Artificial Sequence: Synthetic oligonucleotide
  Description of Combined DNA/RNA Molecule: Synthetic oligonucleotide
aggugggucuccuccuucatt

SEQ ID NO: 1928 - DNA, 21 bp, Artificial Sequence
  Description of Artificial Sequence: Synthetic oligonucleotide
  Description of Combined DNA/RNA Molecule: Synthetic oligonucleotide
aggaagccaggaagaaggctt

SEQ ID NO: 1929 - DNA, 21 bp, Artificial Sequence
  Description of Artificial Sequence: Synthetic oligonucleotide
  Description of Combined DNA/RNA Molecule: Synthetic oligonucleotide
aaagacagaggaguccucctt

SEQ ID NO: 1930 - DNA, 21 bp, Artificial Sequence
  Description of Artificial Sequence: Synthetic oligonucleotide
  Description of Combined DNA/RNA Molecule: Synthetic oligonucleotide
uucucgaagucggugaccatt

SEQ ID NO: 1931 - DNA, 21 bp, Artificial Sequence
  Description of Artificial Sequence: Synthetic oligonucleotide
  Description of Combined DNA/RNA Molecule: Synthetic oligonucleotide
acugucacacuugcuggcctt

SEQ ID NO: 1932 - DNA, 21 bp, Artificial Sequence
  Description of Artificial Sequence: Synthetic oligonucleotide
  Description of Combined DNA/RNA Molecule: Synthetic oligonucleotide
ugccaggugggugccaugatt

SEQ ID NO: 1933 - DNA, 21 bp, Artificial Sequence
  Description of Artificial Sequence: Synthetic oligonucleotide
  Description of Combined DNA/RNA Molecule: Synthetic oligonucleotide
aggcuggaccagcuggcuutt

SEQ ID NO: 1934 - DNA, 21 bp, Artificial Sequence
  Description of Artificial Sequence: Synthetic oligonucleotide
  Description of Combined DNA/RNA Molecule: Synthetic oligonucleotide
ugugaugaccucgggagcutt

SEQ ID NO: 1935 - DNA, 21 bp, Artificial Sequence
  Description of Artificial Sequence: Synthetic oligonucleotide
  Description of Combined DNA/RNA Molecule: Synthetic oligonucleotide
uugggcauugguggccccatt

SEQ ID NO: 1936 - DNA, 21 bp, Artificial Sequence
  Description of Artificial Sequence: Synthetic oligonucleotide
  Description of Combined DNA/RNA Molecule: Synthetic oligonucleotide
agggucaccggcuggucuutt

SEQ ID NO: 1937 - DNA, 21 bp, Artificial Sequence
  Description of Artificial Sequence: Synthetic oligonucleotide
  Description of Combined DNA/RNA Molecule: Synthetic oligonucleotide
ugugacacaaagcaggugctt

SEQ ID NO: 1938 - DNA, 21 bp, Artificial Sequence
  Description of Artificial Sequence: Synthetic oligonucleotide
  Description of Combined DNA/RNA Molecule: Synthetic oligonucleotide
uacaguccugcaaaacagctt

SEQ ID NO: 1939 - DNA, 21 bp, Artificial Sequence
  Description of Artificial Sequence: Synthetic oligonucleotide
  Description of Combined DNA/RNA Molecule: Synthetic oligonucleotide
uguggccauccguguaggctt

SEQ ID NO: 1940 - DNA, 21 bp, Artificial Sequence
  Description of Artificial Sequence: Synthetic oligonucleotide
  Description of Combined DNA/RNA Molecule: Synthetic oligonucleotide
uguggacgcugcaguuggctt

SEQ ID NO: 1941 - DNA, 21 bp, Artificial Sequence
  Description of Artificial Sequence: Synthetic oligonucleotide
  Description of Combined DNA/RNA Molecule: Synthetic oligonucleotide
ucagcugguggagcugugutt

SEQ ID NO: 1942 - DNA, 21 bp, Artificial Sequence
  Description of Artificial Sequence: Synthetic oligonucleotide
  Description of Combined DNA/RNA Molecule: Synthetic oligonucleotide
ugugaggacguggcccugutt

SEQ ID NO: 1943 - DNA, 21 bp, Artificial Sequence
  Description of Artificial Sequence: Synthetic oligonucleotide
  Description of Combined DNA/RNA Molecule: Synthetic oligonucleotide
acgucccggcuccugacuatt

SEQ ID NO: 1944 - DNA, 21 bp, Artificial Sequence
  Description of Artificial Sequence: Synthetic oligonucleotide
  Description of Combined DNA/RNA Molecule: Synthetic oligonucleotide
uucgcuggugcugccuguatt

SEQ ID NO: 1945 - DNA, 21 bp, Artificial Sequence
  Description of Artificial Sequence: Synthetic oligonucleotide
  Description of Combined DNA/RNA Molecule: Synthetic oligonucleotide
agcagauggcaacggcugutt

SEQ ID NO: 1946 - DNA, 21 bp, Artificial Sequence
  Description of Artificial Sequence: Synthetic oligonucleotide
  Description of Combined DNA/RNA Molecule: Synthetic oligonucleotide
aagcucagccccagcccuutt

SEQ ID NO: 1947 - DNA, 21 bp, Artificial Sequence
  Description of Artificial Sequence: Synthetic oligonucleotide
  Description of Combined DNA/RNA Molecule: Synthetic oligonucleotide
aaagcucagccccagcccutt

SEQ ID NO: 1948 - DNA, 21 bp, Artificial Sequence
  Description of Artificial Sequence: Synthetic oligonucleotide
  Description of Combined DNA/RNA Molecule: Synthetic oligonucleotide
aggccauggagggcugagatt

SEQ ID NO: 1949 - DNA, 21 bp, Artificial Sequence
  Description of Artificial Sequence: Synthetic oligonucleotide
  Description of Combined DNA/RNA Molecule: Synthetic oligonucleotide
auugggagcagcuggcagctt

SEQ ID NO: 1950 - DNA, 21 bp, Artificial Sequence
  Description of Artificial Sequence: Synthetic oligonucleotide
  Description of Combined DNA/RNA Molecule: Synthetic oligonucleotide
ugccuccuugguggagacctt

SEQ ID NO: 1951 - DNA, 21 bp, Artificial Sequence
  Description of Artificial Sequence: Synthetic oligonucleotide
  Description of Combined DNA/RNA Molecule: Synthetic oligonucleotide
uccaugggaagaauccugctt

SEQ ID NO: 1952 - DNA, 21 bp, Artificial Sequence
  Description of Artificial Sequence: Synthetic oligonucleotide
  Description of Combined DNA/RNA Molecule: Synthetic oligonucleotide
agaugagggccaucagcactt

SEQ ID NO: 1953 - DNA, 21 bp, Artificial Sequence
  Description of Artificial Sequence: Synthetic oligonucleotide
  Description of Combined DNA/RNA Molecule: Synthetic oligonucleotide
uagcuggagaugagggccatt

SEQ ID NO: 1954 - DNA, 21 bp, Artificial Sequence
  Description of Artificial Sequence: Synthetic oligonucleotide
  Description of Combined DNA/RNA Molecule: Synthetic oligonucleotide
augccauccagaaagcuaatt

SEQ ID NO: 1955 - DNA, 21 bp, Artificial Sequence
  Description of Artificial Sequence: Synthetic oligonucleotide
  Description of Combined DNA/RNA Molecule: Synthetic oligonucleotide
acagccuggcauagagcagtt

SEQ ID NO: 1956 - DNA, 21 bp, Artificial Sequence
  Description of Artificial Sequence: Synthetic oligonucleotide
  Description of Combined DNA/RNA Molecule: Synthetic oligonucleotide
agaggcuuggcuucagagctt

SEQ ID NO: 1957 - DNA, 21 bp, Artificial Sequence
  Description of Artificial Sequence: Synthetic oligonucleotide
  Description of Combined DNA/RNA Molecule: Synthetic oligonucleotide
augccugcaggcaucguuctt

SEQ ID NO: 1958 - DNA, 21 bp, Artificial Sequence
  Description of Artificial Sequence: Synthetic oligonucleotide
  Description of Combined DNA/RNA Molecule: Synthetic oligonucleotide
ucaaggagggacaguuguutt

SEQ ID NO: 1959 - DNA, 21 bp, Artificial Sequence
  Description of Artificial Sequence: Synthetic oligonucleotide
  Description of Combined DNA/RNA Molecule: Synthetic oligonucleotide
uuggcuguaaaaaggcaactt

SEQ ID NO: 1960 - RNA, 21 nt, Artificial Sequence
  Description of Artificial Sequence: Synthetic oligonucleotide
aagcaaaacaggucuagaauu

SEQ ID NO: 1961 - RNA, 21 nt, Artificial Sequence
  Description of Artificial Sequence: Synthetic oligonucleotide
aagcaaaacaggucuagaauu

SEQ ID NO: 1962 - RNA, 21 nt, Artificial Sequence
  Description of Artificial Sequence: Synthetic oligonucleotide
aagcaaaacaggucuagaauu

SEQ ID NO: 1963 - RNA, 21 nt, Artificial Sequence
  Description of Artificial Sequence: Synthetic oligonucleotide
aagcaaaacaggucuagaauu

SEQ ID NO: 1964 - RNA, 21 nt, Artificial Sequence
  Description of Artificial Sequence: Synthetic oligonucleotide
aagcaaaacaggucuagaauu

SEQ ID NO: 1965 - RNA, 21 nt, Artificial Sequence
  Description of Artificial Sequence: Synthetic oligonucleotide
aagcaaaacaggucuagaauu

SEQ ID NO: 1966 - RNA, 21 nt, Artificial Sequence
  Description of Artificial Sequence: Synthetic oligonucleotide
aagcaaaacaggucuagaauu

SEQ ID NO: 1967 - DNA, 21 bp, Artificial Sequence
  Description of Artificial Sequence: Synthetic oligonucleotide
  Description of Combined DNA/RNA Molecule: Synthetic oligonucleotide
aagcaaaacaggucuagaatt

SEQ ID NO: 1968 - DNA, 21 bp, Artificial Sequence
  Description of Artificial Sequence: Synthetic oligonucleotide
  Description of Combined DNA/RNA Molecule: Synthetic oligonucleotide
aggacugugcaggagcugatt

SEQ ID NO: 1969 - DNA, 21 bp, Artificial Sequence
  Description of Artificial Sequence: Synthetic oligonucleotide
  Description of Combined DNA/RNA Molecule: Synthetic oligonucleotide
aaccgugcccuucccuuggtt

SEQ ID NO: 1970 - DNA, 21 bp, Artificial Sequence
  Description of Artificial Sequence: Synthetic oligonucleotide
  Description of Combined DNA/RNA Molecule: Synthetic oligonucleotide
accaccacguaggugccagtt

SEQ ID NO: 1971 - DNA, 21 bp, Artificial Sequence
  Description of Artificial Sequence: Synthetic oligonucleotide
  Description of Combined DNA/RNA Molecule: Synthetic oligonucleotide
aagcaaaacaggucuaggatt

SEQ ID NO: 1972 - DNA, 20 bp, Artificial Sequence
  Description of Artificial Sequence: Synthetic oligonucleotide
  Description of Combined DNA/RNA Molecule: Synthetic oligonucleotide
aagcaaaacaggucuagaat

SEQ ID NO: 1973 - RNA, 19 nt, Artificial Sequence
  Description of Artificial Sequence: Synthetic oligonucleotide
aagcaaaacaggucuagaa

SEQ ID NO: 1974 - RNA, 18 nt, Artificial Sequence
  Description of Artificial Sequence: Synthetic oligonucleotide
aagcaaaacaggucuaga

SEQ ID NO: 1975 - RNA, 17 nt, Artificial Sequence
  Description of Artificial Sequence: Synthetic oligonucleotide
aagcaaaacaggucuag

SEQ ID NO: 1976 - RNA, 16 nt, Artificial Sequence
  Description of Artificial Sequence: Synthetic oligonucleotide
aagcaaaacaggucua

SEQ ID NO: 1977 - RNA, 15 nt, Artificial Sequence
  Description of Artificial Sequence: Synthetic oligonucleotide
aagcaaaacaggucu

SEQ ID NO: 1978 - DNA, 20 bp, Artificial Sequence
  Description of Artificial Sequence: Synthetic oligonucleotide
  Description of Combined DNA/RNA Molecule: Synthetic oligonucleotide
agcaaaacaggucuagaatt

SEQ ID NO: 1979 - DNA, 19 bp, Artificial Sequence
  Description of Artificial Sequence: Synthetic oligonucleotide
  Description of Combined DNA/RNA Molecule: Synthetic oligonucleotide
gcaaaacaggucuagaatt

SEQ ID NO: 1980 - DNA, 18 bp, Artificial Sequence
  Description of Artificial Sequence: Synthetic oligonucleotide
  Description of Combined DNA/RNA Molecule: Synthetic oligonucleotide
caaaacaggucuagaatt

SEQ ID NO: 1981 - DNA, 17 bp, Artificial Sequence
  Description of Artificial Sequence: Synthetic oligonucleotide
  Description of Combined DNA/RNA Molecule: Synthetic oligonucleotide
aaaacaggucuagaatt

SEQ ID NO: 1982 - DNA, 16 bp, Artificial Sequence
  Description of Artificial Sequence: Synthetic oligonucleotide
  Description of Combined DNA/RNA Molecule: Synthetic oligonucleotide
aaacaggucuagaatt

SEQ ID NO: 1983 - DNA, 15 bp, Artificial Sequence
  Description of Artificial Sequence: Synthetic oligonucleotide
  Description of Combined DNA/RNA Molecule: Synthetic oligonucleotide
aacaggucuagaatt

SEQ ID NO: 1984 - DNA, 21 bp, Artificial Sequence
  Description of Artificial Sequence: Synthetic oligonucleotide
  Description of Combined DNA/RNA Molecule: Synthetic oligonucleotide
aaaguugguccccaaaguctt

SEQ ID NO: 1985 - DNA, 21 bp, Artificial Sequence
  Description of Artificial Sequence: Synthetic oligonucleotide
  Description of Combined DNA/RNA Molecule: Synthetic oligonucleotide
caaaguugguccccaaagutt

SEQ ID NO: 1986 - DNA, 21 bp, Artificial Sequence
  Description of Artificial Sequence: Synthetic oligonucleotide
  Description of Combined DNA/RNA Molecule: Synthetic oligonucleotide
agcggccaaaguugguccctt

SEQ ID NO: 1987 - DNA, 21 bp, Artificial Sequence
  Description of Artificial Sequence: Synthetic oligonucleotide
  Description of Combined DNA/RNA Molecule: Synthetic oligonucleotide
cagcggccaaaguuggucctt

SEQ ID NO: 1988 - DNA, 21 bp, Artificial Sequence
  Description of Artificial Sequence: Synthetic oligonucleotide
  Description of Combined DNA/RNA Molecule: Synthetic oligonucleotide
acagcggccaaaguugguctt

SEQ ID NO: 1989 - DNA, 21 bp, Artificial Sequence
  Description of Artificial Sequence: Synthetic oligonucleotide
  Description of Combined DNA/RNA Molecule: Synthetic oligonucleotide
acacagcggccaaaguuggtt

SEQ ID NO: 1990 - DNA, 21 bp, Artificial Sequence
  Description of Artificial Sequence: Synthetic oligonucleotide
  Description of Combined DNA/RNA Molecule: Synthetic oligonucleotide
uccacacagcggccaaagutt

SEQ ID NO: 1991 - DNA, 21 bp, Artificial Sequence
  Description of Artificial Sequence: Synthetic oligonucleotide
  Description of Combined DNA/RNA Molecule: Synthetic oligonucleotide
guccacacagcggccaaagtt

SEQ ID NO: 1992 - DNA, 21 bp, Artificial Sequence
  Description of Artificial Sequence: Synthetic oligonucleotide
  Description of Combined DNA/RNA Molecule: Synthetic oligonucleotide
agguccacacagcggccaatt

SEQ ID NO: 1993 - DNA, 21 bp, Artificial Sequence
  Description of Artificial Sequence: Synthetic oligonucleotide
  Description of Combined DNA/RNA Molecule: Synthetic oligonucleotide
aagagguccacacagcggctt

SEQ ID NO: 1994 - DNA, 21 bp, Artificial Sequence
  Description of Artificial Sequence: Synthetic oligonucleotide
  Description of Combined DNA/RNA Molecule: Synthetic oligonucleotide
aaagagguccacacagcggtt

SEQ ID NO: 1995 - DNA, 21 bp, Artificial Sequence
  Description of Artificial Sequence: Synthetic oligonucleotide
  Description of Combined DNA/RNA Molecule: Synthetic oligonucleotide
uggggcaaagagguccacatt

SEQ ID NO: 1996 - DNA, 21 bp, Artificial Sequence
  Description of Artificial Sequence: Synthetic oligonucleotide
  Description of Combined DNA/RNA Molecule: Synthetic oligonucleotide
cuggggcaaagagguccactt

SEQ ID NO: 1997 - DNA, 21 bp, Artificial Sequence
  Description of Artificial Sequence: Synthetic oligonucleotide
  Description of Combined DNA/RNA Molecule: Synthetic oligonucleotide
aaugauguccuccccugggtt

SEQ ID NO: 1998 - DNA, 21 bp, Artificial Sequence
  Description of Artificial Sequence: Synthetic oligonucleotide
  Description of Combined DNA/RNA Molecule: Synthetic oligonucleotide
caaugauguccuccccuggtt

SEQ ID NO: 1999 - DNA, 21 bp, Artificial Sequence
  Description of Artificial Sequence: Synthetic oligonucleotide
  Description of Combined DNA/RNA Molecule: Synthetic oligonucleotide
accaaugauguccuccccutt

SEQ ID NO: 2000 - DNA, 21 bp, Artificial Sequence
  Description of Artificial Sequence: Synthetic oligonucleotide
  Description of Combined DNA/RNA Molecule: Synthetic oligonucleotide
caccaaugauguccucccctt

SEQ ID NO: 2001 - DNA, 21 bp, Artificial Sequence
  Description of Artificial Sequence: Synthetic oligonucleotide
  Description of Combined DNA/RNA Molecule: Synthetic oligonucleotide
aggcaccaaugauguccuctt

SEQ ID NO: 2002 - DNA, 21 bp, Artificial Sequence
  Description of Artificial Sequence: Synthetic oligonucleotide
  Description of Combined DNA/RNA Molecule: Synthetic oligonucleotide
gaggcaccaaugauguccutt

SEQ ID NO: 2003 - DNA, 21 bp, Artificial Sequence
  Description of Artificial Sequence: Synthetic oligonucleotide
  Description of Combined DNA/RNA Molecule: Synthetic oligonucleotide
cuggaggcaccaaugaugutt

SEQ ID NO: 2004 - DNA, 21 bp, Artificial Sequence
  Description of Artificial Sequence: Synthetic oligonucleotide
  Description of Combined DNA/RNA Molecule: Synthetic oligonucleotide
gucgcuggaggcaccaaugtt

SEQ ID NO: 2005 - DNA, 21 bp, Artificial Sequence
  Description of Artificial Sequence: Synthetic oligonucleotide
  Description of Combined DNA/RNA Molecule: Synthetic oligonucleotide
agucgcuggaggcaccaautt

SEQ ID NO: 2006 - DNA, 21 bp, Artificial Sequence
  Description of Artificial Sequence: Synthetic oligonucleotide
  Description of Combined DNA/RNA Molecule: Synthetic oligonucleotide
cagucgcuggaggcaccaatt

SEQ ID NO: 2007 - DNA, 21 bp, Artificial Sequence
  Description of Artificial Sequence: Synthetic oligonucleotide
  Description of Combined DNA/RNA Molecule: Synthetic oligonucleotide
aggugcugcagucgcuggatt

SEQ ID NO: 2008 - DNA, 21 bp, Artificial Sequence
  Description of Artificial Sequence: Synthetic oligonucleotide
  Description of Combined DNA/RNA Molecule: Synthetic oligonucleotide
agcaggugcugcagucgcutt

SEQ ID NO: 2009 - DNA, 21 bp, Artificial Sequence
  Description of Artificial Sequence: Synthetic oligonucleotide
  Description of Combined DNA/RNA Molecule: Synthetic oligonucleotide
aagcaggugcugcagucgctt

SEQ ID NO: 2010 - DNA, 21 bp, Artificial Sequence
  Description of Artificial Sequence: Synthetic oligonucleotide
  Description of Combined DNA/RNA Molecule: Synthetic oligonucleotide
aaagcaggugcugcagucgtt

SEQ ID NO: 2011 - DNA, 21 bp, Artificial Sequence
  Description of Artificial Sequence: Synthetic oligonucleotide
  Description of Combined DNA/RNA Molecule: Synthetic oligonucleotide
caaagcaggugcugcaguctt

SEQ ID NO: 2012 - DNA, 21 bp, Artificial Sequence
  Description of Artificial Sequence: Synthetic oligonucleotide
  Description of Combined DNA/RNA Molecule: Synthetic oligonucleotide
acaaagcaggugcugcagutt

SEQ ID NO: 2013 - DNA, 21 bp, Artificial Sequence
  Description of Artificial Sequence: Synthetic oligonucleotide
  Description of Combined DNA/RNA Molecule: Synthetic oligonucleotide
cacaaagcaggugcugcagtt

SEQ ID NO: 2014 - DNA, 21 bp, Artificial Sequence
  Description of Artificial Sequence: Synthetic oligonucleotide
  Description of Combined DNA/RNA Molecule: Synthetic oligonucleotide
acacaaagcaggugcugcatt

SEQ ID NO: 2015 - DNA, 21 bp, Artificial Sequence
  Description of Artificial Sequence: Synthetic oligonucleotide
  Description of Combined DNA/RNA Molecule: Synthetic oligonucleotide
gacacaaagcaggugcugctt

SEQ ID NO: 2016 - DNA, 21 bp, Artificial Sequence
  Description of Artificial Sequence: Synthetic oligonucleotide
  Description of Combined DNA/RNA Molecule: Synthetic oligonucleotide
ugacacaaagcaggugcugtt

SEQ ID NO: 2017 - DNA, 21 bp, Artificial Sequence
  Description of Artificial Sequence: Synthetic oligonucleotide
  Description of Combined DNA/RNA Molecule: Synthetic oligonucleotide
aaugccagccacgugggcatt

SEQ ID NO: 2018 - DNA, 21 bp, Artificial Sequence
  Description of Artificial Sequence: Synthetic oligonucleotide
  Description of Combined DNA/RNA Molecule: Synthetic oligonucleotide
ugcaaugccagccacguggtt

SEQ ID NO: 2019 - DNA, 21 bp, Artificial Sequence
  Description of Artificial Sequence: Synthetic oligonucleotide
  Description of Combined DNA/RNA Molecule: Synthetic oligonucleotide
cugcaaugccagccacgugtt

SEQ ID NO: 2020 - DNA, 21 bp, Artificial Sequence
  Description of Artificial Sequence: Synthetic oligonucleotide
  Description of Combined DNA/RNA Molecule: Synthetic oligonucleotide
uggcugcaaugccagccactt

SEQ ID NO: 2021 - DNA, 21 bp, Artificial Sequence
  Description of Artificial Sequence: Synthetic oligonucleotide
  Description of Combined DNA/RNA Molecule: Synthetic oligonucleotide
auggcugcaaugccagccatt

SEQ ID NO: 2022 - DNA, 21 bp, Artificial Sequence
  Description of Artificial Sequence: Synthetic oligonucleotide
  Description of Combined DNA/RNA Molecule: Synthetic oligonucleotide
cauggcugcaaugccagcctt

SEQ ID NO: 2023 - DNA, 21 bp, Artificial Sequence
  Description of Artificial Sequence: Synthetic oligonucleotide
  Description of Combined DNA/RNA Molecule: Synthetic oligonucleotide
ucauggcugcaaugccagctt

SEQ ID NO: 2024 - DNA, 21 bp, Artificial Sequence
  Description of Artificial Sequence: Synthetic oligonucleotide
  Description of Combined DNA/RNA Molecule: Synthetic oligonucleotide
aucauggcugcaaugccagtt

SEQ ID NO: 2025 - DNA, 21 bp, Artificial Sequence
  Description of Artificial Sequence: Synthetic oligonucleotide
  Description of Combined DNA/RNA Molecule: Synthetic oligonucleotide
caucauggcugcaaugccatt

SEQ ID NO: 2026 - DNA, 21 bp, Artificial Sequence
  Description of Artificial Sequence: Synthetic oligonucleotide
  Description of Combined DNA/RNA Molecule: Synthetic oligonucleotide
agcaucauggcugcaaugctt

SEQ ID NO: 2027 - DNA, 21 bp, Artificial Sequence
  Description of Artificial Sequence: Synthetic oligonucleotide
  Description of Combined DNA/RNA Molecule: Synthetic oligonucleotide
cagcaucauggcugcaaugtt

SEQ ID NO: 2028 - DNA, 21 bp, Artificial Sequence
  Description of Artificial Sequence: Synthetic oligonucleotide
  Description of Combined DNA/RNA Molecule: Synthetic oligonucleotide
acagcaucauggcugcaautt

SEQ ID NO: 2029 - DNA, 21 bp, Artificial Sequence
  Description of Artificial Sequence: Synthetic oligonucleotide
  Description of Combined DNA/RNA Molecule: Synthetic oligonucleotide
gacagcaucauggcugcaatt

SEQ ID NO: 2030 - DNA, 21 bp, Artificial Sequence
  Description of Artificial Sequence: Synthetic oligonucleotide
  Description of Combined DNA/RNA Molecule: Synthetic oligonucleotide
agacagcaucauggcugcatt

SEQ ID NO: 2031 - DNA, 21 bp, Artificial Sequence
  Description of Artificial Sequence: Synthetic oligonucleotide
  Description of Combined DNA/RNA Molecule: Synthetic oligonucleotide
cagacagcaucauggcugctt

SEQ ID NO: 2032 - DNA, 21 bp, Artificial Sequence
  Description of Artificial Sequence: Synthetic oligonucleotide
  Description of Combined DNA/RNA Molecule: Synthetic oligonucleotide
ucggcagacagcaucauggtt

SEQ ID NO: 2033 - DNA, 21 bp, Artificial Sequence
  Description of Artificial Sequence: Synthetic oligonucleotide
  Description of Combined DNA/RNA Molecule: Synthetic oligonucleotide
cucggcagacagcaucaugtt

SEQ ID NO: 2034 - DNA, 21 bp, Artificial Sequence
  Description of Artificial Sequence: Synthetic oligonucleotide
  Description of Combined DNA/RNA Molecule: Synthetic oligonucleotide
ucugccucaacucggccagtt

SEQ ID NO: 2035 - DNA, 21 bp, Artificial Sequence
  Description of Artificial Sequence: Synthetic oligonucleotide
  Description of Combined DNA/RNA Molecule: Synthetic oligonucleotide
cucugccucaacucggccatt

SEQ ID NO: 2036 - DNA, 21 bp, Artificial Sequence
  Description of Artificial Sequence: Synthetic oligonucleotide
  Description of Combined DNA/RNA Molecule: Synthetic oligonucleotide
ucucugccucaacucggcctt

SEQ ID NO: 2037 - DNA, 21 bp, Artificial Sequence
  Description of Artificial Sequence: Synthetic oligonucleotide
  Description of Combined DNA/RNA Molecule: Synthetic oligonucleotide
gucucugccucaacucggctt

SEQ ID NO: 2038 - DNA, 21 bp, Artificial Sequence
  Description of Artificial Sequence: Synthetic oligonucleotide
  Description of Combined DNA/RNA Molecule: Synthetic oligonucleotide
agucucugccucaacucggtt

SEQ ID NO: 2039 - DNA, 21 bp, Artificial Sequence
  Description of Artificial Sequence: Synthetic oligonucleotide
  Description of Combined DNA/RNA Molecule: Synthetic oligonucleotide
cagucucugccucaacucgtt

SEQ ID NO: 2040 - DNA, 21 bp, Artificial Sequence
  Description of Artificial Sequence: Synthetic oligonucleotide
  Description of Combined DNA/RNA Molecule: Synthetic oligonucleotide
ucagucucugccucaacuctt

SEQ ID NO: 2041 - DNA, 21 bp, Artificial Sequence
  Description of Artificial Sequence: Synthetic oligonucleotide
  Description of Combined DNA/RNA Molecule: Synthetic oligonucleotide
aucagucucugccucaacutt

SEQ ID NO: 2042 - DNA, 21 bp, Artificial Sequence
  Description of Artificial Sequence: Synthetic oligonucleotide
  Description of Combined DNA/RNA Molecule: Synthetic oligonucleotide
uggaucagucucugccucatt

SEQ ID NO: 2043 - DNA, 21 bp, Artificial Sequence
  Description of Artificial Sequence: Synthetic oligonucleotide
  Description of Combined DNA/RNA Molecule: Synthetic oligonucleotide
guggaucagucucugccuctt

SEQ ID NO: 2044 - DNA, 21 bp, Artificial Sequence
  Description of Artificial Sequence: Synthetic oligonucleotide
  Description of Combined DNA/RNA Molecule: Synthetic oligonucleotide
aguggaucagucucugccutt

SEQ ID NO: 2045 - DNA, 21 bp, Artificial Sequence
  Description of Artificial Sequence: Synthetic oligonucleotide
  Description of Combined DNA/RNA Molecule: Synthetic oligonucleotide
aaguggaucagucucugcctt

SEQ ID NO: 2046 - DNA, 21 bp, Artificial Sequence
  Description of Artificial Sequence: Synthetic oligonucleotide
  Description of Combined DNA/RNA Molecule: Synthetic oligonucleotide
agaaguggaucagucucugtt

SEQ ID NO: 2047 - DNA, 21 bp, Artificial Sequence
  Description of Artificial Sequence: Synthetic oligonucleotide
  Description of Combined DNA/RNA Molecule: Synthetic oligonucleotide
agagaaguggaucagucuctt

SEQ ID NO: 2048 - DNA, 21 bp, Artificial Sequence
  Description of Artificial Sequence: Synthetic oligonucleotide
  Description of Combined DNA/RNA Molecule: Synthetic oligonucleotide
cagagaaguggaucagucutt

SEQ ID NO: 2049 - DNA, 21 bp, Artificial Sequence
  Description of Artificial Sequence: Synthetic oligonucleotide
  Description of Combined DNA/RNA Molecule: Synthetic oligonucleotide
uggcagagaaguggaucagtt

SEQ ID NO: 2050 - DNA, 21 bp, Artificial Sequence
  Description of Artificial Sequence: Synthetic oligonucleotide
  Description of Combined DNA/RNA Molecule: Synthetic oligonucleotide
uuggcagagaaguggaucatt

SEQ ID NO: 2051 - DNA, 21 bp, Artificial Sequence
  Description of Artificial Sequence: Synthetic oligonucleotide
  Description of Combined DNA/RNA Molecule: Synthetic oligonucleotide
uuuggcagagaaguggauctt

SEQ ID NO: 2052 - DNA, 21 bp, Artificial Sequence
  Description of Artificial Sequence: Synthetic oligonucleotide
  Description of Combined DNA/RNA Molecule: Synthetic oligonucleotide
cuuuggcagagaaguggautt

SEQ ID NO: 2053 - DNA, 21 bp, Artificial Sequence
  Description of Artificial Sequence: Synthetic oligonucleotide
  Description of Combined DNA/RNA Molecule: Synthetic oligonucleotide
ucuuuggcagagaaguggatt

SEQ ID NO: 2054 - DNA, 21 bp, Artificial Sequence
  Description of Artificial Sequence: Synthetic oligonucleotide
  Description of Combined DNA/RNA Molecule: Synthetic oligonucleotide
aucuuuggcagagaaguggtt

SEQ ID NO: 2055 - DNA, 21 bp, Artificial Sequence
  Description of Artificial Sequence: Synthetic oligonucleotide
  Description of Combined DNA/RNA Molecule: Synthetic oligonucleotide
caucuuuggcagagaagugtt

SEQ ID NO: 2056 - DNA, 21 bp, Artificial Sequence
  Description of Artificial Sequence: Synthetic oligonucleotide
  Description of Combined DNA/RNA Molecule: Synthetic oligonucleotide
acaucuuuggcagagaagutt

SEQ ID NO: 2057 - DNA, 21 bp, Artificial Sequence
  Description of Artificial Sequence: Synthetic oligonucleotide
  Description of Combined DNA/RNA Molecule: Synthetic oligonucleotide
gacaucuuuggcagagaagtt

SEQ ID NO: 2058 - DNA, 21 bp, Artificial Sequence
  Description of Artificial Sequence: Synthetic oligonucleotide
  Description of Combined DNA/RNA Molecule: Synthetic oligonucleotide
augacaucuuuggcagagatt

SEQ ID NO: 2059 - DNA, 21 bp, Artificial Sequence
  Description of Artificial Sequence: Synthetic oligonucleotide
  Description of Combined DNA/RNA Molecule: Synthetic oligonucleotide
ugaugacaucuuuggcagatt

SEQ ID NO: 2060 - DNA, 21 bp, Artificial Sequence
  Description of Artificial Sequence: Synthetic oligonucleotide
  Description of Combined DNA/RNA Molecule: Synthetic oligonucleotide
uugaugacaucuuuggcagtt

SEQ ID NO: 2061 - DNA, 21 bp, Artificial Sequence
  Description of Artificial Sequence: Synthetic oligonucleotide
  Description of Combined DNA/RNA Molecule: Synthetic oligonucleotide
auugaugacaucuuuggcatt

SEQ ID NO: 2062 - DNA, 21 bp, Artificial Sequence
  Description of Artificial Sequence: Synthetic oligonucleotide
  Description of Combined DNA/RNA Molecule: Synthetic oligonucleotide
cauugaugacaucuuuggctt

SEQ ID NO: 2063 - DNA, 21 bp, Artificial Sequence
  Description of Artificial Sequence: Synthetic oligonucleotide
  Description of Combined DNA/RNA Molecule: Synthetic oligonucleotide
ucauugaugacaucuuuggtt

SEQ ID NO: 2064 - DNA, 21 bp, Artificial Sequence
  Description of Artificial Sequence: Synthetic oligonucleotide
  Description of Combined DNA/RNA Molecule: Synthetic oligonucleotide
cucauugaugacaucuuugtt

SEQ ID NO: 2065 - DNA, 21 bp, Artificial Sequence
  Description of Artificial Sequence: Synthetic oligonucleotide
  Description of Combined DNA/RNA Molecule: Synthetic oligonucleotide
aggccucauugaugacauctt

SEQ ID NO: 2066 - DNA, 21 bp, Artificial Sequence
  Description of Artificial Sequence: Synthetic oligonucleotide
  Description of Combined DNA/RNA Molecule: Synthetic oligonucleotide
caggccucauugaugacautt

SEQ ID NO: 2067 - DNA, 21 bp, Artificial Sequence
  Description of Artificial Sequence: Synthetic oligonucleotide
  Description of Combined DNA/RNA Molecule: Synthetic oligonucleotide
accaggccucauugaugactt

SEQ ID NO: 2068 - DNA, 21 bp, Artificial Sequence
  Description of Artificial Sequence: Synthetic oligonucleotide
  Description of Combined DNA/RNA Molecule: Synthetic oligonucleotide
aaccaggccucauugaugatt

SEQ ID NO: 2069 - DNA, 21 bp, Artificial Sequence
  Description of Artificial Sequence: Synthetic oligonucleotide
  Description of Combined DNA/RNA Molecule: Synthetic oligonucleotide
gaaccaggccucauugaugtt

SEQ ID NO: 2070 - DNA, 21 bp, Artificial Sequence
  Description of Artificial Sequence: Synthetic oligonucleotide
  Description of Combined DNA/RNA Molecule: Synthetic oligonucleotide
agggaaccaggccucauugtt

SEQ ID NO: 2071 - DNA, 21 bp, Artificial Sequence
  Description of Artificial Sequence: Synthetic oligonucleotide
  Description of Combined DNA/RNA Molecule: Synthetic oligonucleotide
cagggaaccaggccucauutt

SEQ ID NO: 2072 - DNA, 21 bp, Artificial Sequence
  Description of Artificial Sequence: Synthetic oligonucleotide
  Description of Combined DNA/RNA Molecule: Synthetic oligonucleotide
ucagggaaccaggccucautt

SEQ ID NO: 2073 - DNA, 21 bp, Artificial Sequence
  Description of Artificial Sequence: Synthetic oligonucleotide
  Description of Combined DNA/RNA Molecule: Synthetic oligonucleotide
cucagggaaccaggccucatt

SEQ ID NO: 2074 - DNA, 21 bp, Artificial Sequence
  Description of Artificial Sequence: Synthetic oligonucleotide
  Description of Combined DNA/RNA Molecule: Synthetic oligonucleotide
uccucagggaaccaggccutt

SEQ ID NO: 2075 - DNA, 21 bp, Artificial Sequence
  Description of Artificial Sequence: Synthetic oligonucleotide
  Description of Combined DNA/RNA Molecule: Synthetic oligonucleotide
ucaguacccgcugguccuctt

SEQ ID NO: 2076 - DNA, 21 bp, Artificial Sequence
  Description of Artificial Sequence: Synthetic oligonucleotide
  Description of Combined DNA/RNA Molecule: Synthetic oligonucleotide
gucaguacccgcugguccutt

SEQ ID NO: 2077 - DNA, 21 bp, Artificial Sequence
  Description of Artificial Sequence: Synthetic oligonucleotide
  Description of Combined DNA/RNA Molecule: Synthetic oligonucleotide
aacagcugccaaccugccctt

SEQ ID NO: 2078 - DNA, 21 bp, Artificial Sequence
  Description of Artificial Sequence: Synthetic oligonucleotide
  Description of Combined DNA/RNA Molecule: Synthetic oligonucleotide
aaacagcugccaaccugcctt

SEQ ID NO: 2079 - DNA, 21 bp, Artificial Sequence
  Description of Artificial Sequence: Synthetic oligonucleotide
  Description of Combined DNA/RNA Molecule: Synthetic oligonucleotide
aaaacagcugccaaccugctt

SEQ ID NO: 2080 - DNA, 21 bp, Artificial Sequence
  Description of Artificial Sequence: Synthetic oligonucleotide
  Description of Combined DNA/RNA Molecule: Synthetic oligonucleotide
uggcucacuccuccaggcutt

SEQ ID NO: 2081 - DNA, 21 bp, Artificial Sequence
  Description of Artificial Sequence: Synthetic oligonucleotide
  Description of Combined DNA/RNA Molecule: Synthetic oligonucleotide
ugccuggcucacuccuccatt

SEQ ID NO: 2082 - DNA, 21 bp, Artificial Sequence
  Description of Artificial Sequence: Synthetic oligonucleotide
  Description of Combined DNA/RNA Molecule: Synthetic oligonucleotide
acugccuggcucacuccuctt

SEQ ID NO: 2083 - DNA, 21 bp, Artificial Sequence
  Description of Artificial Sequence: Synthetic oligonucleotide
  Description of Combined DNA/RNA Molecule: Synthetic oligonucleotide
cacugccuggcucacuccutt

SEQ ID NO: 2084 - DNA, 21 bp, Artificial Sequence
  Description of Artificial Sequence: Synthetic oligonucleotide
  Description of Combined DNA/RNA Molecule: Synthetic oligonucleotide
ucacugccuggcucacucctt

SEQ ID NO: 2085 - DNA, 21 bp, Artificial Sequence
  Description of Artificial Sequence: Synthetic oligonucleotide
  Description of Combined DNA/RNA Molecule: Synthetic oligonucleotide
cucacugccuggcucacuctt

SEQ ID NO: 2086 - DNA, 21 bp, Artificial Sequence
  Description of Artificial Sequence: Synthetic oligonucleotide
  Description of Combined DNA/RNA Molecule: Synthetic oligonucleotide
ucucacugccuggcucacutt

SEQ ID NO: 2087 - DNA, 21 bp, Artificial Sequence
  Description of Artificial Sequence: Synthetic oligonucleotide
  Description of Combined DNA/RNA Molecule: Synthetic oligonucleotide
gucucacugccuggcucactt

SEQ ID NO: 2088 - DNA, 21 bp, Artificial Sequence
  Description of Artificial Sequence: Synthetic oligonucleotide
  Description of Combined DNA/RNA Molecule: Synthetic oligonucleotide
agucucacugccuggcucatt

SEQ ID NO: 2089 - DNA, 21 bp, Artificial Sequence
  Description of Artificial Sequence: Synthetic oligonucleotide
  Description of Combined DNA/RNA Molecule: Synthetic oligonucleotide
cagucucacugccuggcuctt

SEQ ID NO: 2090 - DNA, 21 bp, Artificial Sequence
  Description of Artificial Sequence: Synthetic oligonucleotide
  Description of Combined DNA/RNA Molecule: Synthetic oligonucleotide
aauccuggcugggagcuggtt

SEQ ID NO: 2091 - DNA, 21 bp, Artificial Sequence
  Description of Artificial Sequence: Synthetic oligonucleotide
  Description of Combined DNA/RNA Molecule: Synthetic oligonucleotide
gaauccuggcugggagcugtt

SEQ ID NO: 2092 - DNA, 21 bp, Artificial Sequence
  Description of Artificial Sequence: Synthetic oligonucleotide
  Description of Combined DNA/RNA Molecule: Synthetic oligonucleotide
gaggacugugcaggagcugtt

SEQ ID NO: 2093 - DNA, 21 bp, Artificial Sequence
  Description of Artificial Sequence: Synthetic oligonucleotide
  Description of Combined DNA/RNA Molecule: Synthetic oligonucleotide
uggggaggacugugcaggatt

SEQ ID NO: 2094 - DNA, 21 bp, Artificial Sequence
  Description of Artificial Sequence: Synthetic oligonucleotide
  Description of Combined DNA/RNA Molecule: Synthetic oligonucleotide
aggagaccuagaggccgugtt

SEQ ID NO: 2095 - DNA, 21 bp, Artificial Sequence
  Description of Artificial Sequence: Synthetic oligonucleotide
  Description of Combined DNA/RNA Molecule: Synthetic oligonucleotide
gaggagaccuagaggccgutt

SEQ ID NO: 2096 - DNA, 21 bp, Artificial Sequence
  Description of Artificial Sequence: Synthetic oligonucleotide
  Description of Combined DNA/RNA Molecule: Synthetic oligonucleotide
uagucgccguccucguccutt

SEQ ID NO: 2097 - DNA, 21 bp, Artificial Sequence
  Description of Artificial Sequence: Synthetic oligonucleotide
  Description of Combined DNA/RNA Molecule: Synthetic oligonucleotide
ucguagucgccguccucgutt

SEQ ID NO: 2098 - DNA, 21 bp, Artificial Sequence
  Description of Artificial Sequence: Synthetic oligonucleotide
  Description of Combined DNA/RNA Molecule: Synthetic oligonucleotide
uccucguagucgccguccutt

SEQ ID NO: 2099 - DNA, 21 bp, Artificial Sequence
  Description of Artificial Sequence: Synthetic oligonucleotide
  Description of Combined DNA/RNA Molecule: Synthetic oligonucleotide
agcuccucguagucgccgutt

SEQ ID NO: 2100 - DNA, 21 bp, Artificial Sequence
  Description of Artificial Sequence: Synthetic oligonucleotide
  Description of Combined DNA/RNA Molecule: Synthetic oligonucleotide
accagcuccucguagucgctt

SEQ ID NO: 2101 - DNA, 21 bp, Artificial Sequence
  Description of Artificial Sequence: Synthetic oligonucleotide
  Description of Combined DNA/RNA Molecule: Synthetic oligonucleotide
caccagcuccucguagucgtt

SEQ ID NO: 2102 - DNA, 21 bp, Artificial Sequence
  Description of Artificial Sequence: Synthetic oligonucleotide
  Description of Combined DNA/RNA Molecule: Synthetic oligonucleotide
agcaccagcuccucguagutt

SEQ ID NO: 2103 - DNA, 21 bp, Artificial Sequence
  Description of Artificial Sequence: Synthetic oligonucleotide
  Description of Combined DNA/RNA Molecule: Synthetic oligonucleotide
uagcaccagcuccucguagtt

SEQ ID NO: 2104 - DNA, 21 bp, Artificial Sequence
  Description of Artificial Sequence: Synthetic oligonucleotide
  Description of Combined DNA/RNA Molecule: Synthetic oligonucleotide
cuagcaccagcuccucguatt

SEQ ID NO: 2105 - DNA, 21 bp, Artificial Sequence
  Description of Artificial Sequence: Synthetic oligonucleotide
  Description of Combined DNA/RNA Molecule: Synthetic oligonucleotide
aggcuagcaccagcuccuctt

SEQ ID NO: 2106 - DNA, 21 bp, Artificial Sequence
  Description of Artificial Sequence: Synthetic oligonucleotide
  Description of Combined DNA/RNA Molecule: Synthetic oligonucleotide
aaggcuagcaccagcuccutt

SEQ ID NO: 2107 - DNA, 21 bp, Artificial Sequence
  Description of Artificial Sequence: Synthetic oligonucleotide
  Description of Combined DNA/RNA Molecule: Synthetic oligonucleotide
gaacgcaaggcuagcaccatt

SEQ ID NO: 2108 - DNA, 21 bp, Artificial Sequence
  Description of Artificial Sequence: Synthetic oligonucleotide
  Description of Combined DNA/RNA Molecule: Synthetic oligonucleotide
cucggaacgcaaggcuagctt

SEQ ID NO: 2109 - DNA, 21 bp, Artificial Sequence
  Description of Artificial Sequence: Synthetic oligonucleotide
  Description of Combined DNA/RNA Molecule: Synthetic oligonucleotide
cuccucggaacgcaaggcutt

SEQ ID NO: 2110 - DNA, 21 bp, Artificial Sequence
  Description of Artificial Sequence: Synthetic oligonucleotide
  Description of Combined DNA/RNA Molecule: Synthetic oligonucleotide
uccuccucggaacgcaaggtt

SEQ ID NO: 2111 - DNA, 21 bp, Artificial Sequence
  Description of Artificial Sequence: Synthetic oligonucleotide
  Description of Combined DNA/RNA Molecule: Synthetic oligonucleotide
guccuccucggaacgcaagtt

SEQ ID NO: 2112 - DNA, 21 bp, Artificial Sequence
  Description of Artificial Sequence: Synthetic oligonucleotide
  Description of Combined DNA/RNA Molecule: Synthetic oligonucleotide
agcgguggaagguggcugutt

SEQ ID NO: 2113 - DNA, 21 bp, Artificial Sequence
  Description of Artificial Sequence: Synthetic oligonucleotide
  Description of Combined DNA/RNA Molecule: Synthetic oligonucleotide
uccacggauccuuggcgcatt

SEQ ID NO: 2114 - DNA, 21 bp, Artificial Sequence
  Description of Artificial Sequence: Synthetic oligonucleotide
  Description of Combined DNA/RNA Molecule: Synthetic oligonucleotide
agcaccaccacguaggugctt

SEQ ID NO: 2115 - DNA, 21 bp, Artificial Sequence
  Description of Artificial Sequence: Synthetic oligonucleotide
  Description of Combined DNA/RNA Molecule: Synthetic oligonucleotide
cagcaccaccacguaggugtt

SEQ ID NO: 2116 - DNA, 21 bp, Artificial Sequence
  Description of Artificial Sequence: Synthetic oligonucleotide
  Description of Combined DNA/RNA Molecule: Synthetic oligonucleotide
ucagcaccaccacguaggutt

SEQ ID NO: 2117 - DNA, 21 bp, Artificial Sequence
  Description of Artificial Sequence: Synthetic oligonucleotide
  Description of Combined DNA/RNA Molecule: Synthetic oligonucleotide
uucagcaccaccacguaggtt

SEQ ID NO: 2118 - DNA, 21 bp, Artificial Sequence
  Description of Artificial Sequence: Synthetic oligonucleotide
  Description of Combined DNA/RNA Molecule: Synthetic oligonucleotide
cuucagcaccaccacguagtt

SEQ ID NO: 2119 - DNA, 21 bp, Artificial Sequence
  Description of Artificial Sequence: Synthetic oligonucleotide
  Description of Combined DNA/RNA Molecule: Synthetic oligonucleotide
uccuucagcaccaccacgutt

SEQ ID NO: 2120 - DNA, 21 bp, Artificial Sequence
  Description of Artificial Sequence: Synthetic oligonucleotide
  Description of Combined DNA/RNA Molecule: Synthetic oligonucleotide
cuccuucagcaccaccacgtt

SEQ ID NO: 2121 - DNA, 21 bp, Artificial Sequence
  Description of Artificial Sequence: Synthetic oligonucleotide
  Description of Combined DNA/RNA Molecule: Synthetic oligonucleotide
uccuccuucagcaccaccatt

SEQ ID NO: 2122 - DNA, 21 bp, Artificial Sequence
  Description of Artificial Sequence: Synthetic oligonucleotide
  Description of Combined DNA/RNA Molecule: Synthetic oligonucleotide
cuccuccuucagcaccacctt

SEQ ID NO: 2123 - DNA, 21 bp, Artificial Sequence
  Description of Artificial Sequence: Synthetic oligonucleotide
  Description of Combined DNA/RNA Molecule: Synthetic oligonucleotide
ucuccuccuucagcaccactt

SEQ ID NO: 2124 - DNA, 21 bp, Artificial Sequence
  Description of Artificial Sequence: Synthetic oligonucleotide
  Description of Combined DNA/RNA Molecule: Synthetic oligonucleotide
gucuccuccuucagcaccatt

SEQ ID NO: 2125 - DNA, 21 bp, Artificial Sequence
  Description of Artificial Sequence: Synthetic oligonucleotide
  Description of Combined DNA/RNA Molecule: Synthetic oligonucleotide
ugggucuccuccuucagcatt

SEQ ID NO: 2126 - DNA, 21 bp, Artificial Sequence
  Description of Artificial Sequence: Synthetic oligonucleotide
  Description of Combined DNA/RNA Molecule: Synthetic oligonucleotide
gugggucuccuccuucagctt

SEQ ID NO: 2127 - DNA, 21 bp, Artificial Sequence
  Description of Artificial Sequence: Synthetic oligonucleotide
  Description of Combined DNA/RNA Molecule: Synthetic oligonucleotide
cagugcgcucugacugcgatt

SEQ ID NO: 2128 - DNA, 21 bp, Artificial Sequence
  Description of Artificial Sequence: Synthetic oligonucleotide
  Description of Combined DNA/RNA Molecule: Synthetic oligonucleotide
uuggugagguauccccggctt

SEQ ID NO: 2129 - DNA, 21 bp, Artificial Sequence
  Description of Artificial Sequence: Synthetic oligonucleotide
  Description of Combined DNA/RNA Molecule: Synthetic oligonucleotide
cuuggugagguauccccggtt

SEQ ID NO: 2130 - DNA, 21 bp, Artificial Sequence
  Description of Artificial Sequence: Synthetic oligonucleotide
  Description of Combined DNA/RNA Molecule: Synthetic oligonucleotide
ucuuggugagguauccccgtt

SEQ ID NO: 2131 - DNA, 21 bp, Artificial Sequence
  Description of Artificial Sequence: Synthetic oligonucleotide
  Description of Combined DNA/RNA Molecule: Synthetic oligonucleotide
aucuuggugagguaucccctt

SEQ ID NO: 2132 - DNA, 21 bp, Artificial Sequence
  Description of Artificial Sequence: Synthetic oligonucleotide
  Description of Combined DNA/RNA Molecule: Synthetic oligonucleotide
aggaucuuggugagguauctt

SEQ ID NO: 2133 - DNA, 21 bp, Artificial Sequence
  Description of Artificial Sequence: Synthetic oligonucleotide
  Description of Combined DNA/RNA Molecule: Synthetic oligonucleotide
caggaucuuggugagguautt

SEQ ID NO: 2134 - DNA, 21 bp, Artificial Sequence
  Description of Artificial Sequence: Synthetic oligonucleotide
  Description of Combined DNA/RNA Molecule: Synthetic oligonucleotide
ugcaggaucuuggugaggutt

SEQ ID NO: 2135 - DNA, 21 bp, Artificial Sequence
  Description of Artificial Sequence: Synthetic oligonucleotide
  Description of Combined DNA/RNA Molecule: Synthetic oligonucleotide
augcaggaucuuggugaggtt

SEQ ID NO: 2136 - DNA, 21 bp, Artificial Sequence
  Description of Artificial Sequence: Synthetic oligonucleotide
  Description of Combined DNA/RNA Molecule: Synthetic oligonucleotide
caugcaggaucuuggugagtt

SEQ ID NO: 2137 - DNA, 21 bp, Artificial Sequence
  Description of Artificial Sequence: Synthetic oligonucleotide
  Description of Combined DNA/RNA Molecule: Synthetic oligonucleotide
acaugcaggaucuuggugatt

SEQ ID NO: 2138 - DNA, 21 bp, Artificial Sequence
  Description of Artificial Sequence: Synthetic oligonucleotide
  Description of Combined DNA/RNA Molecule: Synthetic oligonucleotide
gacaugcaggaucuuggugtt

SEQ ID NO: 2139 - DNA, 21 bp, Artificial Sequence
  Description of Artificial Sequence: Synthetic oligonucleotide
  Description of Combined DNA/RNA Molecule: Synthetic oligonucleotide
agacaugcaggaucuuggutt

SEQ ID NO: 2140 - DNA, 21 bp, Artificial Sequence
  Description of Artificial Sequence: Synthetic oligonucleotide
  Description of Combined DNA/RNA Molecule: Synthetic oligonucleotide
aagacaugcaggaucuuggtt

SEQ ID NO: 2141 - DNA, 21 bp, Artificial Sequence
  Description of Artificial Sequence: Synthetic oligonucleotide
  Description of Combined DNA/RNA Molecule: Synthetic oligonucleotide
gaagacaugcaggaucuugtt

SEQ ID NO: 2142 - DNA, 21 bp, Artificial Sequence
  Description of Artificial Sequence: Synthetic oligonucleotide
  Description of Combined DNA/RNA Molecule: Synthetic oligonucleotide
uggaagacaugcaggaucutt

SEQ ID NO: 2143 - DNA, 21 bp, Artificial Sequence
  Description of Artificial Sequence: Synthetic oligonucleotide
  Description of Combined DNA/RNA Molecule: Synthetic oligonucleotide
auggaagacaugcaggauctt

SEQ ID NO: 2144 - DNA, 21 bp, Artificial Sequence
  Description of Artificial Sequence: Synthetic oligonucleotide
  Description of Combined DNA/RNA Molecule: Synthetic oligonucleotide
caggaagccaggaagaaggtt

SEQ ID NO: 2145 - DNA, 21 bp, Artificial Sequence
  Description of Artificial Sequence: Synthetic oligonucleotide
  Description of Combined DNA/RNA Molecule: Synthetic oligonucleotide
accaggaagccaggaagaatt

SEQ ID NO: 2146 - DNA, 21 bp, Artificial Sequence
  Description of Artificial Sequence: Synthetic oligonucleotide
  Description of Combined DNA/RNA Molecule: Synthetic oligonucleotide
caccaggaagccaggaagatt

SEQ ID NO: 2147 - DNA, 21 bp, Artificial Sequence
  Description of Artificial Sequence: Synthetic oligonucleotide
  Description of Combined DNA/RNA Molecule: Synthetic oligonucleotide
ucaccaggaagccaggaagtt

SEQ ID NO: 2148 - DNA, 21 bp, Artificial Sequence
  Description of Artificial Sequence: Synthetic oligonucleotide
  Description of Combined DNA/RNA Molecule: Synthetic oligonucleotide
uucaccaggaagccaggaatt

SEQ ID NO: 2149 - DNA, 21 bp, Artificial Sequence
  Description of Artificial Sequence: Synthetic oligonucleotide
  Description of Combined DNA/RNA Molecule: Synthetic oligonucleotide
cuucaccaggaagccaggatt

SEQ ID NO: 2150 - DNA, 21 bp, Artificial Sequence
  Description of Artificial Sequence: Synthetic oligonucleotide
  Description of Combined DNA/RNA Molecule: Synthetic oligonucleotide
ucuucaccaggaagccaggtt

SEQ ID NO: 2151 - DNA, 21 bp, Artificial Sequence
  Description of Artificial Sequence: Synthetic oligonucleotide
  Description of Combined DNA/RNA Molecule: Synthetic oligonucleotide
aucuucaccaggaagccagtt

SEQ ID NO: 2152 - DNA, 21 bp, Artificial Sequence
  Description of Artificial Sequence: Synthetic oligonucleotide
  Description of Combined DNA/RNA Molecule: Synthetic oligonucleotide
caucuucaccaggaagccatt

SEQ ID NO: 2153 - DNA, 21 bp, Artificial Sequence
  Description of Artificial Sequence: Synthetic oligonucleotide
  Description of Combined DNA/RNA Molecule: Synthetic oligonucleotide
ucaucuucaccaggaagcctt

SEQ ID NO: 2154 - DNA, 21 bp, Artificial Sequence
  Description of Artificial Sequence: Synthetic oligonucleotide
  Description of Combined DNA/RNA Molecule: Synthetic oligonucleotide
cucaucuucaccaggaagctt

SEQ ID NO: 2155 - DNA, 21 bp, Artificial Sequence
  Description of Artificial Sequence: Synthetic oligonucleotide
  Description of Combined DNA/RNA Molecule: Synthetic oligonucleotide
acucaucuucaccaggaagtt

SEQ ID NO: 2156 - DNA, 21 bp, Artificial Sequence
  Description of Artificial Sequence: Synthetic oligonucleotide
  Description of Combined DNA/RNA Molecule: Synthetic oligonucleotide
cacucaucuucaccaggaatt

SEQ ID NO: 2157 - DNA, 21 bp, Artificial Sequence
  Description of Artificial Sequence: Synthetic oligonucleotide
  Description of Combined DNA/RNA Molecule: Synthetic oligonucleotide
gucgccacucaucuucacctt

SEQ ID NO: 2158 - DNA, 21 bp, Artificial Sequence
  Description of Artificial Sequence: Synthetic oligonucleotide
  Description of Combined DNA/RNA Molecule: Synthetic oligonucleotide
aggucgccacucaucuucatt

SEQ ID NO: 2159 - DNA, 21 bp, Artificial Sequence
  Description of Artificial Sequence: Synthetic oligonucleotide
  Description of Combined DNA/RNA Molecule: Synthetic oligonucleotide
agcaggucgccacucaucutt

SEQ ID NO: 2160 - DNA, 21 bp, Artificial Sequence
  Description of Artificial Sequence: Synthetic oligonucleotide
  Description of Combined DNA/RNA Molecule: Synthetic oligonucleotide
cagcaggucgccacucauctt

SEQ ID NO: 2161 - DNA, 21 bp, Artificial Sequence
  Description of Artificial Sequence: Synthetic oligonucleotide
  Description of Combined DNA/RNA Molecule: Synthetic oligonucleotide
uccagcaggucgccacucatt

SEQ ID NO: 2162 - DNA, 21 bp, Artificial Sequence
  Description of Artificial Sequence: Synthetic oligonucleotide
  Description of Combined DNA/RNA Molecule: Synthetic oligonucleotide
ucgacauggggcaacuucatt

SEQ ID NO: 2163 - DNA, 21 bp, Artificial Sequence
  Description of Artificial Sequence: Synthetic oligonucleotide
  Description of Combined DNA/RNA Molecule: Synthetic oligonucleotide
gucgacauggggcaacuuctt

SEQ ID NO: 2164 - DNA, 21 bp, Artificial Sequence
  Description of Artificial Sequence: Synthetic oligonucleotide
  Description of Combined DNA/RNA Molecule: Synthetic oligonucleotide
agucgacauggggcaacuutt

SEQ ID NO: 2165 - DNA, 21 bp, Artificial Sequence
  Description of Artificial Sequence: Synthetic oligonucleotide
  Description of Combined DNA/RNA Molecule: Synthetic oligonucleotide
uagucgacauggggcaacutt

SEQ ID NO: 2166 - DNA, 21 bp, Artificial Sequence
  Description of Artificial Sequence: Synthetic oligonucleotide
  Description of Combined DNA/RNA Molecule: Synthetic oligonucleotide
guagucgacauggggcaactt

SEQ ID NO: 2167 - DNA, 21 bp, Artificial Sequence
  Description of Artificial Sequence: Synthetic oligonucleotide
  Description of Combined DNA/RNA Molecule: Synthetic oligonucleotide
uguagucgacauggggcaatt

SEQ ID NO: 2168 - DNA, 21 bp, Artificial Sequence
  Description of Artificial Sequence: Synthetic oligonucleotide
  Description of Combined DNA/RNA Molecule: Synthetic oligonucleotide
auguagucgacauggggcatt

SEQ ID NO: 2169 - DNA, 21 bp, Artificial Sequence
  Description of Artificial Sequence: Synthetic oligonucleotide
  Description of Combined DNA/RNA Molecule: Synthetic oligonucleotide
gauguagucgacauggggctt

SEQ ID NO: 2170 - DNA, 21 bp, Artificial Sequence
  Description of Artificial Sequence: Synthetic oligonucleotide
  Description of Combined DNA/RNA Molecule: Synthetic oligonucleotide
cucgauguagucgacauggtt

SEQ ID NO: 2171 - DNA, 21 bp, Artificial Sequence
  Description of Artificial Sequence: Synthetic oligonucleotide
  Description of Combined DNA/RNA Molecule: Synthetic oligonucleotide
uccucgauguagucgacautt

SEQ ID NO: 2172 - DNA, 21 bp, Artificial Sequence
  Description of Artificial Sequence: Synthetic oligonucleotide
  Description of Combined DNA/RNA Molecule: Synthetic oligonucleotide
cuccucgauguagucgacatt

SEQ ID NO: 2173 - DNA, 21 bp, Artificial Sequence
  Description of Artificial Sequence: Synthetic oligonucleotide
  Description of Combined DNA/RNA Molecule: Synthetic oligonucleotide
uccuccucgauguagucgatt

SEQ ID NO: 2174 - DNA, 21 bp, Artificial Sequence
  Description of Artificial Sequence: Synthetic oligonucleotide
  Description of Combined DNA/RNA Molecule: Synthetic oligonucleotide
guccuccucgauguagucgtt

SEQ ID NO: 2175 - DNA, 21 bp, Artificial Sequence
  Description of Artificial Sequence: Synthetic oligonucleotide
  Description of Combined DNA/RNA Molecule: Synthetic oligonucleotide
aguccuccucgauguaguctt

SEQ ID NO: 2176 - DNA, 21 bp, Artificial Sequence
  Description of Artificial Sequence: Synthetic oligonucleotide
  Description of Combined DNA/RNA Molecule: Synthetic oligonucleotide
cagcugguggagcugugugtt

SEQ ID NO: 2177 - DNA, 21 bp, Artificial Sequence
  Description of Artificial Sequence: Synthetic oligonucleotide
  Description of Combined DNA/RNA Molecule: Synthetic oligonucleotide
aguggacacggguccccautt

SEQ ID NO: 2178 - DNA, 21 bp, Artificial Sequence
  Description of Artificial Sequence: Synthetic oligonucleotide
  Description of Combined DNA/RNA Molecule: Synthetic oligonucleotide
ugcagccugugaggacgugtt

SEQ ID NO: 2179 - DNA, 21 bp, Artificial Sequence
  Description of Artificial Sequence: Synthetic oligonucleotide
  Description of Combined DNA/RNA Molecule: Synthetic oligonucleotide
cugcagccugugaggacgutt

SEQ ID NO: 2180 - DNA, 21 bp, Artificial Sequence
  Description of Artificial Sequence: Synthetic oligonucleotide
  Description of Combined DNA/RNA Molecule: Synthetic oligonucleotide
agcugcagccugugaggactt

SEQ ID NO: 2181 - DNA, 21 bp, Artificial Sequence
  Description of Artificial Sequence: Synthetic oligonucleotide
  Description of Combined DNA/RNA Molecule: Synthetic oligonucleotide
gagcugcagccugugaggatt

SEQ ID NO: 2182 - DNA, 21 bp, Artificial Sequence
  Description of Artificial Sequence: Synthetic oligonucleotide
  Description of Combined DNA/RNA Molecule: Synthetic oligonucleotide
ugggagcugcagccugugatt

SEQ ID NO: 2183 - DNA, 21 bp, Artificial Sequence
  Description of Artificial Sequence: Synthetic oligonucleotide
  Description of Combined DNA/RNA Molecule: Synthetic oligonucleotide
agugggagcugcagccugutt

SEQ ID NO: 2184 - DNA, 21 bp, Artificial Sequence
  Description of Artificial Sequence: Synthetic oligonucleotide
  Description of Combined DNA/RNA Molecule: Synthetic oligonucleotide
agguccuccaccucccagutt

SEQ ID NO: 2185 - DNA, 21 bp, Artificial Sequence
  Description of Artificial Sequence: Synthetic oligonucleotide
  Description of Combined DNA/RNA Molecule: Synthetic oligonucleotide
aagguccuccaccucccagtt

SEQ ID NO: 2186 - DNA, 21 bp, Artificial Sequence
  Description of Artificial Sequence: Synthetic oligonucleotide
  Description of Combined DNA/RNA Molecule: Synthetic oligonucleotide
caagguccuccaccucccatt

SEQ ID NO: 2187 - DNA, 21 bp, Artificial Sequence
  Description of Artificial Sequence: Synthetic oligonucleotide
  Description of Combined DNA/RNA Molecule: Synthetic oligonucleotide
ugccaagguccuccaccuctt

SEQ ID NO: 2188 - DNA, 21 bp, Artificial Sequence
  Description of Artificial Sequence: Synthetic oligonucleotide
  Description of Combined DNA/RNA Molecule: Synthetic oligonucleotide
gugccaagguccuccaccutt

SEQ ID NO: 2189 - DNA, 21 bp, Artificial Sequence
  Description of Artificial Sequence: Synthetic oligonucleotide
  Description of Combined DNA/RNA Molecule: Synthetic oligonucleotide
ugggugccaagguccuccatt

SEQ ID NO: 2190 - DNA, 21 bp, Artificial Sequence
  Description of Artificial Sequence: Synthetic oligonucleotide
  Description of Combined DNA/RNA Molecule: Synthetic oligonucleotide
ugugggugccaagguccuctt

SEQ ID NO: 2191 - DNA, 21 bp, Artificial Sequence
  Description of Artificial Sequence: Synthetic oligonucleotide
  Description of Combined DNA/RNA Molecule: Synthetic oligonucleotide
uugugggugccaagguccutt

SEQ ID NO: 2192 - DNA, 21 bp, Artificial Sequence
  Description of Artificial Sequence: Synthetic oligonucleotide
  Description of Combined DNA/RNA Molecule: Synthetic oligonucleotide
cuugugggugccaaggucctt

SEQ ID NO: 2193 - DNA, 21 bp, Artificial Sequence
  Description of Artificial Sequence: Synthetic oligonucleotide
  Description of Combined DNA/RNA Molecule: Synthetic oligonucleotide
ucagcacaggcggcuugugtt

SEQ ID NO: 2194 - DNA, 21 bp, Artificial Sequence
  Description of Artificial Sequence: Synthetic oligonucleotide
  Description of Combined DNA/RNA Molecule: Synthetic oligonucleotide
cucagcacaggcggcuugutt

SEQ ID NO: 2195 - DNA, 21 bp, Artificial Sequence
  Description of Artificial Sequence: Synthetic oligonucleotide
  Description of Combined DNA/RNA Molecule: Synthetic oligonucleotide
accucguggccucagcacatt

SEQ ID NO: 2196 - DNA, 21 bp, Artificial Sequence
  Description of Artificial Sequence: Synthetic oligonucleotide
  Description of Combined DNA/RNA Molecule: Synthetic oligonucleotide
ugguugggcugaccucgugtt

SEQ ID NO: 2197 - DNA, 21 bp, Artificial Sequence
  Description of Artificial Sequence: Synthetic oligonucleotide
  Description of Combined DNA/RNA Molecule: Synthetic oligonucleotide
cugguugggcugaccucgutt

SEQ ID NO: 2198 - DNA, 21 bp, Artificial Sequence
  Description of Artificial Sequence: Synthetic oligonucleotide
  Description of Combined DNA/RNA Molecule: Synthetic oligonucleotide
cacugguugggcugaccuctt

SEQ ID NO: 2199 - DNA, 21 bp, Artificial Sequence
  Description of Artificial Sequence: Synthetic oligonucleotide
  Description of Combined DNA/RNA Molecule: Synthetic oligonucleotide
uggaugcuggccucccugutt

SEQ ID NO: 2200 - DNA, 21 bp, Artificial Sequence
  Description of Artificial Sequence: Synthetic oligonucleotide
  Description of Combined DNA/RNA Molecule: Synthetic oligonucleotide
aagcguggaugcuggccuctt

SEQ ID NO: 2201 - DNA, 21 bp, Artificial Sequence
  Description of Artificial Sequence: Synthetic oligonucleotide
  Description of Combined DNA/RNA Molecule: Synthetic oligonucleotide
gaagcguggaugcuggccutt

SEQ ID NO: 2202 - DNA, 21 bp, Artificial Sequence
  Description of Artificial Sequence: Synthetic oligonucleotide
  Description of Combined DNA/RNA Molecule: Synthetic oligonucleotide
aggaagcguggaugcuggctt

SEQ ID NO: 2203 - DNA, 21 bp, Artificial Sequence
  Description of Artificial Sequence: Synthetic oligonucleotide
  Description of Combined DNA/RNA Molecule: Synthetic oligonucleotide
agcaggaagcguggaugcutt

SEQ ID NO: 2204 - DNA, 21 bp, Artificial Sequence
  Description of Artificial Sequence: Synthetic oligonucleotide
  Description of Combined DNA/RNA Molecule: Synthetic oligonucleotide
cagcaggaagcguggaugctt

SEQ ID NO: 2205 - DNA, 21 bp, Artificial Sequence
  Description of Artificial Sequence: Synthetic oligonucleotide
  Description of Combined DNA/RNA Molecule: Synthetic oligonucleotide
uggcagcaggaagcguggatt

SEQ ID NO: 2206 - DNA, 21 bp, Artificial Sequence
  Description of Artificial Sequence: Synthetic oligonucleotide
  Description of Combined DNA/RNA Molecule: Synthetic oligonucleotide
auggcagcaggaagcguggtt

SEQ ID NO: 2207 - DNA, 21 bp, Artificial Sequence
  Description of Artificial Sequence: Synthetic oligonucleotide
  Description of Combined DNA/RNA Molecule: Synthetic oligonucleotide
cauggcagcaggaagcgugtt

SEQ ID NO: 2208 - DNA, 21 bp, Artificial Sequence
  Description of Artificial Sequence: Synthetic oligonucleotide
  Description of Combined DNA/RNA Molecule: Synthetic oligonucleotide
uggggcauggcagcaggaatt

SEQ ID NO: 2209 - DNA, 21 bp, Artificial Sequence
  Description of Artificial Sequence: Synthetic oligonucleotide
  Description of Combined DNA/RNA Molecule: Synthetic oligonucleotide
uuccagaccuggggcauggtt

SEQ ID NO: 2210 - DNA, 21 bp, Artificial Sequence
  Description of Artificial Sequence: Synthetic oligonucleotide
  Description of Combined DNA/RNA Molecule: Synthetic oligonucleotide
auuccagaccuggggcaugtt

SEQ ID NO: 2211 - DNA, 21 bp, Artificial Sequence
  Description of Artificial Sequence: Synthetic oligonucleotide
  Description of Combined DNA/RNA Molecule: Synthetic oligonucleotide
cauuccagaccuggggcautt

SEQ ID NO: 2212 - DNA, 21 bp, Artificial Sequence
  Description of Artificial Sequence: Synthetic oligonucleotide
  Description of Combined DNA/RNA Molecule: Synthetic oligonucleotide
ugcauuccagaccuggggctt

SEQ ID NO: 2213 - DNA, 21 bp, Artificial Sequence
  Description of Artificial Sequence: Synthetic oligonucleotide
  Description of Combined DNA/RNA Molecule: Synthetic oligonucleotide
uugcauuccagaccuggggtt

SEQ ID NO: 2214 - DNA, 21 bp, Artificial Sequence
  Description of Artificial Sequence: Synthetic oligonucleotide
  Description of Combined DNA/RNA Molecule: Synthetic oligonucleotide
cuuugcauuccagaccuggtt

SEQ ID NO: 2215 - DNA, 21 bp, Artificial Sequence
  Description of Artificial Sequence: Synthetic oligonucleotide
  Description of Combined DNA/RNA Molecule: Synthetic oligonucleotide
acuuugcauuccagaccugtt

SEQ ID NO: 2216 - DNA, 21 bp, Artificial Sequence
  Description of Artificial Sequence: Synthetic oligonucleotide
  Description of Combined DNA/RNA Molecule: Synthetic oligonucleotide
gacuuugcauuccagaccutt

SEQ ID NO: 2217 - DNA, 21 bp, Artificial Sequence
  Description of Artificial Sequence: Synthetic oligonucleotide
  Description of Combined DNA/RNA Molecule: Synthetic oligonucleotide
ugacuuugcauuccagacctt

SEQ ID NO: 2218 - DNA, 21 bp, Artificial Sequence
  Description of Artificial Sequence: Synthetic oligonucleotide
  Description of Combined DNA/RNA Molecule: Synthetic oligonucleotide
uugacuuugcauuccagactt

SEQ ID NO: 2219 - DNA, 21 bp, Artificial Sequence
  Description of Artificial Sequence: Synthetic oligonucleotide
  Description of Combined DNA/RNA Molecule: Synthetic oligonucleotide
cuugacuuugcauuccagatt

SEQ ID NO: 2220 - DNA, 21 bp, Artificial Sequence
  Description of Artificial Sequence: Synthetic oligonucleotide
  Description of Combined DNA/RNA Molecule: Synthetic oligonucleotide
uccuugacuuugcauuccatt

SEQ ID NO: 2221 - DNA, 21 bp, Artificial Sequence
  Description of Artificial Sequence: Synthetic oligonucleotide
  Description of Combined DNA/RNA Molecule: Synthetic oligonucleotide
cuccuugacuuugcauucctt

SEQ ID NO: 2222 - DNA, 21 bp, Artificial Sequence
  Description of Artificial Sequence: Synthetic oligonucleotide
  Description of Combined DNA/RNA Molecule: Synthetic oligonucleotide
ugcuccuugacuuugcauutt

SEQ ID NO: 2223 - DNA, 21 bp, Artificial Sequence
  Description of Artificial Sequence: Synthetic oligonucleotide
  Description of Combined DNA/RNA Molecule: Synthetic oligonucleotide
augcuccuugacuuugcautt

SEQ ID NO: 2224 - DNA, 21 bp, Artificial Sequence
  Description of Artificial Sequence: Synthetic oligonucleotide
  Description of Combined DNA/RNA Molecule: Synthetic oligonucleotide
caugcuccuugacuuugcatt

SEQ ID NO: 2225 - DNA, 21 bp, Artificial Sequence
  Description of Artificial Sequence: Synthetic oligonucleotide
  Description of Combined DNA/RNA Molecule: Synthetic oligonucleotide
uccaugcuccuugacuuugtt

SEQ ID NO: 2226 - DNA, 21 bp, Artificial Sequence
  Description of Artificial Sequence: Synthetic oligonucleotide
  Description of Combined DNA/RNA Molecule: Synthetic oligonucleotide
uuccaugcuccuugacuuutt

SEQ ID NO: 2227 - DNA, 21 bp, Artificial Sequence
  Description of Artificial Sequence: Synthetic oligonucleotide
  Description of Combined DNA/RNA Molecule: Synthetic oligonucleotide
auuccaugcuccuugacuutt

SEQ ID NO: 2228 - DNA, 21 bp, Artificial Sequence
  Description of Artificial Sequence: Synthetic oligonucleotide
  Description of Combined DNA/RNA Molecule: Synthetic oligonucleotide
ugaggggccgggauuccautt

SEQ ID NO: 2229 - DNA, 21 bp, Artificial Sequence
  Description of Artificial Sequence: Synthetic oligonucleotide
  Description of Combined DNA/RNA Molecule: Synthetic oligonucleotide
cuucgcuggugcugccugutt

SEQ ID NO: 2230 - DNA, 21 bp, Artificial Sequence
  Description of Artificial Sequence: Synthetic oligonucleotide
  Description of Combined DNA/RNA Molecule: Synthetic oligonucleotide
cagcagauggcaacggcugtt

SEQ ID NO: 2231 - DNA, 21 bp, Artificial Sequence
  Description of Artificial Sequence: Synthetic oligonucleotide
  Description of Combined DNA/RNA Molecule: Synthetic oligonucleotide
uccggcagcagauggcaactt

SEQ ID NO: 2232 - DNA, 21 bp, Artificial Sequence
  Description of Artificial Sequence: Synthetic oligonucleotide
  Description of Combined DNA/RNA Molecule: Synthetic oligonucleotide
cuccggcagcagauggcaatt

SEQ ID NO: 2233 - DNA, 21 bp, Artificial Sequence
  Description of Artificial Sequence: Synthetic oligonucleotide
  Description of Combined DNA/RNA Molecule: Synthetic oligonucleotide
ucacuggagcuccugggagtt

SEQ ID NO: 2234 - DNA, 21 bp, Artificial Sequence
  Description of Artificial Sequence: Synthetic oligonucleotide
  Description of Combined DNA/RNA Molecule: Synthetic oligonucleotide
gucacuggagcuccugggatt

SEQ ID NO: 2235 - DNA, 21 bp, Artificial Sequence
  Description of Artificial Sequence: Synthetic oligonucleotide
  Description of Combined DNA/RNA Molecule: Synthetic oligonucleotide
ugucacuggagcuccugggtt

SEQ ID NO: 2236 - DNA, 21 bp, Artificial Sequence
  Description of Artificial Sequence: Synthetic oligonucleotide
  Description of Combined DNA/RNA Molecule: Synthetic oligonucleotide
cugucacuggagcuccuggtt

SEQ ID NO: 2237 - DNA, 21 bp, Artificial Sequence
  Description of Artificial Sequence: Synthetic oligonucleotide
  Description of Combined DNA/RNA Molecule: Synthetic oligonucleotide
uggggcugucacuggagcutt

SEQ ID NO: 2238 - DNA, 21 bp, Artificial Sequence
  Description of Artificial Sequence: Synthetic oligonucleotide
  Description of Combined DNA/RNA Molecule: Synthetic oligonucleotide
auggggcugucacuggagctt

SEQ ID NO: 2239 - DNA, 21 bp, Artificial Sequence
  Description of Artificial Sequence: Synthetic oligonucleotide
  Description of Combined DNA/RNA Molecule: Synthetic oligonucleotide
gauggggcugucacuggagtt

SEQ ID NO: 2240 - DNA, 21 bp, Artificial Sequence
  Description of Artificial Sequence: Synthetic oligonucleotide
  Description of Combined DNA/RNA Molecule: Synthetic oligonucleotide
ugggauggggcugucacugtt

SEQ ID NO: 2241 - DNA, 21 bp, Artificial Sequence
  Description of Artificial Sequence: Synthetic oligonucleotide
  Description of Combined DNA/RNA Molecule: Synthetic oligonucleotide
cugggauggggcugucacutt

SEQ ID NO: 2242 - DNA, 21 bp, Artificial Sequence
  Description of Artificial Sequence: Synthetic oligonucleotide
  Description of Combined DNA/RNA Molecule: Synthetic oligonucleotide
uccugggauggggcugucatt

SEQ ID NO: 2243 - DNA, 21 bp, Artificial Sequence
  Description of Artificial Sequence: Synthetic oligonucleotide
  Description of Combined DNA/RNA Molecule: Synthetic oligonucleotide
auccugggauggggcuguctt

SEQ ID NO: 2244 - DNA, 21 bp, Artificial Sequence
  Description of Artificial Sequence: Synthetic oligonucleotide
  Description of Combined DNA/RNA Molecule: Synthetic oligonucleotide
cauccugggauggggcugutt

SEQ ID NO: 2245 - DNA, 21 bp, Artificial Sequence
  Description of Artificial Sequence: Synthetic oligonucleotide
  Description of Combined DNA/RNA Molecule: Synthetic oligonucleotide
uaaagcucagccccagccctt

SEQ ID NO: 2246 - DNA, 21 bp, Artificial Sequence
  Description of Artificial Sequence: Synthetic oligonucleotide
  Description of Combined DNA/RNA Molecule: Synthetic oligonucleotide
uuaaagcucagccccagcctt

SEQ ID NO: 2247 - DNA, 21 bp, Artificial Sequence
  Description of Artificial Sequence: Synthetic oligonucleotide
  Description of Combined DNA/RNA Molecule: Synthetic oligonucleotide
uuuaaagcucagccccagctt

SEQ ID NO: 2248 - DNA, 21 bp, Artificial Sequence
  Description of Artificial Sequence: Synthetic oligonucleotide
  Description of Combined DNA/RNA Molecule: Synthetic oligonucleotide
accauuuuaaagcucagcctt

SEQ ID NO: 2249 - DNA, 21 bp, Artificial Sequence
  Description of Artificial Sequence: Synthetic oligonucleotide
  Description of Combined DNA/RNA Molecule: Synthetic oligonucleotide
aaccauuuuaaagcucagctt

SEQ ID NO: 2250 - DNA, 21 bp, Artificial Sequence
  Description of Artificial Sequence: Synthetic oligonucleotide
  Description of Combined DNA/RNA Molecule: Synthetic oligonucleotide
gaaccauuuuaaagcucagtt

SEQ ID NO: 2251 - DNA, 21 bp, Artificial Sequence
  Description of Artificial Sequence: Synthetic oligonucleotide
  Description of Combined DNA/RNA Molecule: Synthetic oligonucleotide
agcuuccuggcaccuccactt

SEQ ID NO: 2252 - DNA, 21 bp, Artificial Sequence
  Description of Artificial Sequence: Synthetic oligonucleotide
  Description of Combined DNA/RNA Molecule: Synthetic oligonucleotide
gagcuuccuggcaccuccatt

SEQ ID NO: 2253 - DNA, 21 bp, Artificial Sequence
  Description of Artificial Sequence: Synthetic oligonucleotide
  Description of Combined DNA/RNA Molecule: Synthetic oligonucleotide
agggagcuuccuggcaccutt

SEQ ID NO: 2254 - DNA, 21 bp, Artificial Sequence
  Description of Artificial Sequence: Synthetic oligonucleotide
  Description of Combined DNA/RNA Molecule: Synthetic oligonucleotide
gugaaaugccccacagugatt

SEQ ID NO: 2255 - DNA, 21 bp, Artificial Sequence
  Description of Artificial Sequence: Synthetic oligonucleotide
  Description of Combined DNA/RNA Molecule: Synthetic oligonucleotide
uggugaaaugccccacagutt

SEQ ID NO: 2256 - DNA, 21 bp, Artificial Sequence
  Description of Artificial Sequence: Synthetic oligonucleotide
  Description of Combined DNA/RNA Molecule: Synthetic oligonucleotide
auggugaaaugccccacagtt

SEQ ID NO: 2257 - DNA, 21 bp, Artificial Sequence
  Description of Artificial Sequence: Synthetic oligonucleotide
  Description of Combined DNA/RNA Molecule: Synthetic oligonucleotide
aauggugaaaugccccacatt

SEQ ID NO: 2258 - DNA, 21 bp, Artificial Sequence
  Description of Artificial Sequence: Synthetic oligonucleotide
  Description of Combined DNA/RNA Molecule: Synthetic oligonucleotide
uugggagcagcuggcagcatt

SEQ ID NO: 2259 - DNA, 21 bp, Artificial Sequence
  Description of Artificial Sequence: Synthetic oligonucleotide
  Description of Combined DNA/RNA Molecule: Synthetic oligonucleotide
aacaagagcucaauaaaagtt

SEQ ID NO: 2260 - DNA, 21 bp, Artificial Sequence
  Description of Artificial Sequence: Synthetic oligonucleotide
  Description of Combined DNA/RNA Molecule: Synthetic oligonucleotide
cugccuccuugguggagactt

SEQ ID NO: 2261 - DNA, 21 bp, Artificial Sequence
  Description of Artificial Sequence: Synthetic oligonucleotide
  Description of Combined DNA/RNA Molecule: Synthetic oligonucleotide
uccugccuccuugguggagtt

SEQ ID NO: 2262 - DNA, 21 bp, Artificial Sequence
  Description of Artificial Sequence: Synthetic oligonucleotide
  Description of Combined DNA/RNA Molecule: Synthetic oligonucleotide
auccugccuccuugguggatt

SEQ ID NO: 2263 - DNA, 21 bp, Artificial Sequence
  Description of Artificial Sequence: Synthetic oligonucleotide
  Description of Combined DNA/RNA Molecule: Synthetic oligonucleotide
aauccugccuccuugguggtt

SEQ ID NO: 2264 - DNA, 21 bp, Artificial Sequence
  Description of Artificial Sequence: Synthetic oligonucleotide
  Description of Combined DNA/RNA Molecule: Synthetic oligonucleotide
agaauccugccuccuuggutt

SEQ ID NO: 2265 - DNA, 21 bp, Artificial Sequence
  Description of Artificial Sequence: Synthetic oligonucleotide
  Description of Combined DNA/RNA Molecule: Synthetic oligonucleotide
aagaauccugccuccuuggtt

SEQ ID NO: 2266 - DNA, 21 bp, Artificial Sequence
  Description of Artificial Sequence: Synthetic oligonucleotide
  Description of Combined DNA/RNA Molecule: Synthetic oligonucleotide
gaagaauccugccuccuugtt

SEQ ID NO: 2267 - DNA, 21 bp, Artificial Sequence
  Description of Artificial Sequence: Synthetic oligonucleotide
  Description of Combined DNA/RNA Molecule: Synthetic oligonucleotide
ugggaagaauccugccucctt

SEQ ID NO: 2268 - DNA, 21 bp, Artificial Sequence
  Description of Artificial Sequence: Synthetic oligonucleotide
  Description of Combined DNA/RNA Molecule: Synthetic oligonucleotide
augggaagaauccugccuctt

SEQ ID NO: 2269 - DNA, 21 bp, Artificial Sequence
  Description of Artificial Sequence: Synthetic oligonucleotide
  Description of Combined DNA/RNA Molecule: Synthetic oligonucleotide
caugggaagaauccugccutt

SEQ ID NO: 2270 - DNA, 21 bp, Artificial Sequence
  Description of Artificial Sequence: Synthetic oligonucleotide
  Description of Combined DNA/RNA Molecule: Synthetic oligonucleotide
gagaugagggccaucagcatt

SEQ ID NO: 2271 - DNA, 21 bp, Artificial Sequence
  Description of Artificial Sequence: Synthetic oligonucleotide
  Description of Combined DNA/RNA Molecule: Synthetic oligonucleotide
uggagaugagggccaucagtt

SEQ ID NO: 2272 - DNA, 21 bp, Artificial Sequence
  Description of Artificial Sequence: Synthetic oligonucleotide
  Description of Combined DNA/RNA Molecule: Synthetic oligonucleotide
cuggagaugagggccaucatt

SEQ ID NO: 2273 - DNA, 21 bp, Artificial Sequence
  Description of Artificial Sequence: Synthetic oligonucleotide
  Description of Combined DNA/RNA Molecule: Synthetic oligonucleotide
agcuggagaugagggccautt

SEQ ID NO: 2274 - DNA, 21 bp, Artificial Sequence
  Description of Artificial Sequence: Synthetic oligonucleotide
  Description of Combined DNA/RNA Molecule: Synthetic oligonucleotide
agaugccauccagaaagcutt

SEQ ID NO: 2275 - DNA, 21 bp, Artificial Sequence
  Description of Artificial Sequence: Synthetic oligonucleotide
  Description of Combined DNA/RNA Molecule: Synthetic oligonucleotide
uagaugccauccagaaagctt

SEQ ID NO: 2276 - DNA, 21 bp, Artificial Sequence
  Description of Artificial Sequence: Synthetic oligonucleotide
  Description of Combined DNA/RNA Molecule: Synthetic oligonucleotide
cuagaugccauccagaaagtt

SEQ ID NO: 2277 - DNA, 21 bp, Artificial Sequence
  Description of Artificial Sequence: Synthetic oligonucleotide
  Description of Combined DNA/RNA Molecule: Synthetic oligonucleotide
cuggcuagaugccauccagtt

SEQ ID NO: 2278 - DNA, 21 bp, Artificial Sequence
  Description of Artificial Sequence: Synthetic oligonucleotide
  Description of Combined DNA/RNA Molecule: Synthetic oligonucleotide
ucuggcuagaugccauccatt

SEQ ID NO: 2279 - DNA, 21 bp, Artificial Sequence
  Description of Artificial Sequence: Synthetic oligonucleotide
  Description of Combined DNA/RNA Molecule: Synthetic oligonucleotide
cucuggcuagaugccaucctt

SEQ ID NO: 2280 - DNA, 21 bp, Artificial Sequence
  Description of Artificial Sequence: Synthetic oligonucleotide
  Description of Combined DNA/RNA Molecule: Synthetic oligonucleotide
agccucuggcuagaugccatt

SEQ ID NO: 2281 - DNA, 21 bp, Artificial Sequence
  Description of Artificial Sequence: Synthetic oligonucleotide
  Description of Combined DNA/RNA Molecule: Synthetic oligonucleotide
cagccucuggcuagaugcctt

SEQ ID NO: 2282 - DNA, 21 bp, Artificial Sequence
  Description of Artificial Sequence: Synthetic oligonucleotide
  Description of Combined DNA/RNA Molecule: Synthetic oligonucleotide
uccagccucuggcuagaugtt

SEQ ID NO: 2283 - DNA, 21 bp, Artificial Sequence
  Description of Artificial Sequence: Synthetic oligonucleotide
  Description of Combined DNA/RNA Molecule: Synthetic oligonucleotide
ucuccagccucuggcuagatt

SEQ ID NO: 2284 - DNA, 21 bp, Artificial Sequence
  Description of Artificial Sequence: Synthetic oligonucleotide
  Description of Combined DNA/RNA Molecule: Synthetic oligonucleotide
agcacagccuggcauagagtt

SEQ ID NO: 2285 - DNA, 21 bp, Artificial Sequence
  Description of Artificial Sequence: Synthetic oligonucleotide
  Description of Combined DNA/RNA Molecule: Synthetic oligonucleotide
uagcacagccuggcauagatt

SEQ ID NO: 2286 - DNA, 21 bp, Artificial Sequence
  Description of Artificial Sequence: Synthetic oligonucleotide
  Description of Combined DNA/RNA Molecule: Synthetic oligonucleotide
uggagcggguuggcugagatt

SEQ ID NO: 2287 - DNA, 21 bp, Artificial Sequence
  Description of Artificial Sequence: Synthetic oligonucleotide
  Description of Combined DNA/RNA Molecule: Synthetic oligonucleotide
aguggagcggguuggcugatt

SEQ ID NO: 2288 - DNA, 21 bp, Artificial Sequence
  Description of Artificial Sequence: Synthetic oligonucleotide
  Description of Combined DNA/RNA Molecule: Synthetic oligonucleotide
uaguggagcggguuggcugtt

SEQ ID NO: 2289 - DNA, 21 bp, Artificial Sequence
  Description of Artificial Sequence: Synthetic oligonucleotide
  Description of Combined DNA/RNA Molecule: Synthetic oligonucleotide
guaguggagcggguuggcutt

SEQ ID NO: 2290 - DNA, 21 bp, Artificial Sequence
  Description of Artificial Sequence: Synthetic oligonucleotide
  Description of Combined DNA/RNA Molecule: Synthetic oligonucleotide
ugugugagcuuggcaggcatt

SEQ ID NO: 2291 - DNA, 21 bp, Artificial Sequence
  Description of Artificial Sequence: Synthetic oligonucleotide
  Description of Combined DNA/RNA Molecule: Synthetic oligonucleotide
cugugugagcuuggcaggctt

SEQ ID NO: 2292 - DNA, 21 bp, Artificial Sequence
  Description of Artificial Sequence: Synthetic oligonucleotide
  Description of Combined DNA/RNA Molecule: Synthetic oligonucleotide
ugcugugugagcuuggcagtt

SEQ ID NO: 2293 - DNA, 21 bp, Artificial Sequence
  Description of Artificial Sequence: Synthetic oligonucleotide
  Description of Combined DNA/RNA Molecule: Synthetic oligonucleotide
cugcugugugagcuuggcatt

SEQ ID NO: 2294 - DNA, 21 bp, Artificial Sequence
  Description of Artificial Sequence: Synthetic oligonucleotide
  Description of Combined DNA/RNA Molecule: Synthetic oligonucleotide
uccugcugugugagcuuggtt

SEQ ID NO: 2295 - DNA, 21 bp, Artificial Sequence
  Description of Artificial Sequence: Synthetic oligonucleotide
  Description of Combined DNA/RNA Molecule: Synthetic oligonucleotide
uuccugcugugugagcuugtt

SEQ ID NO: 2296 - DNA, 21 bp, Artificial Sequence
  Description of Artificial Sequence: Synthetic oligonucleotide
  Description of Combined DNA/RNA Molecule: Synthetic oligonucleotide
guuccugcugugugagcuutt

SEQ ID NO: 2297 - DNA, 21 bp, Artificial Sequence
  Description of Artificial Sequence: Synthetic oligonucleotide
  Description of Combined DNA/RNA Molecule: Synthetic oligonucleotide
aguuccugcugugugagcutt

SEQ ID NO: 2298 - DNA, 21 bp, Artificial Sequence
  Description of Artificial Sequence: Synthetic oligonucleotide
  Description of Combined DNA/RNA Molecule: Synthetic oligonucleotide
caguuccugcugugugagctt

SEQ ID NO: 2299 - DNA, 21 bp, Artificial Sequence
  Description of Artificial Sequence: Synthetic oligonucleotide
  Description of Combined DNA/RNA Molecule: Synthetic oligonucleotide
ucaguuccugcugugugagtt

SEQ ID NO: 2300 - DNA, 21 bp, Artificial Sequence
  Description of Artificial Sequence: Synthetic oligonucleotide
  Description of Combined DNA/RNA Molecule: Synthetic oligonucleotide
cucaguuccugcugugugatt

SEQ ID NO: 2301 - DNA, 21 bp, Artificial Sequence
  Description of Artificial Sequence: Synthetic oligonucleotide
  Description of Combined DNA/RNA Molecule: Synthetic oligonucleotide
uggcucaguuccugcugugtt

SEQ ID NO: 2302 - DNA, 21 bp, Artificial Sequence
  Description of Artificial Sequence: Synthetic oligonucleotide
  Description of Combined DNA/RNA Molecule: Synthetic oligonucleotide
cuggcucaguuccugcugutt

SEQ ID NO: 2303 - DNA, 21 bp, Artificial Sequence
  Description of Artificial Sequence: Synthetic oligonucleotide
  Description of Combined DNA/RNA Molecule: Synthetic oligonucleotide
ucuggcucaguuccugcugtt

SEQ ID NO: 2304 - DNA, 21 bp, Artificial Sequence
  Description of Artificial Sequence: Synthetic oligonucleotide
  Description of Combined DNA/RNA Molecule: Synthetic oligonucleotide
uucuggcucaguuccugcutt

SEQ ID NO: 2305 - DNA, 21 bp, Artificial Sequence
  Description of Artificial Sequence: Synthetic oligonucleotide
  Description of Combined DNA/RNA Molecule: Synthetic oligonucleotide
uuucuggcucaguuccugctt

SEQ ID NO: 2306 - DNA, 21 bp, Artificial Sequence
  Description of Artificial Sequence: Synthetic oligonucleotide
  Description of Combined DNA/RNA Molecule: Synthetic oligonucleotide
guuucuggcucaguuccugtt

SEQ ID NO: 2307 - DNA, 21 bp, Artificial Sequence
  Description of Artificial Sequence: Synthetic oligonucleotide
  Description of Combined DNA/RNA Molecule: Synthetic oligonucleotide
aagaggcuuggcuucagagtt

SEQ ID NO: 2308 - DNA, 21 bp, Artificial Sequence
  Description of Artificial Sequence: Synthetic oligonucleotide
  Description of Combined DNA/RNA Molecule: Synthetic oligonucleotide
gaagaggcuuggcuucagatt

SEQ ID NO: 2309 - DNA, 21 bp, Artificial Sequence
  Description of Artificial Sequence: Synthetic oligonucleotide
  Description of Combined DNA/RNA Molecule: Synthetic oligonucleotide
agaagaggcuuggcuucagtt

SEQ ID NO: 2310 - DNA, 21 bp, Artificial Sequence
  Description of Artificial Sequence: Synthetic oligonucleotide
  Description of Combined DNA/RNA Molecule: Synthetic oligonucleotide
aagaagaggcuuggcuucatt

SEQ ID NO: 2311 - DNA, 21 bp, Artificial Sequence
  Description of Artificial Sequence: Synthetic oligonucleotide
  Description of Combined DNA/RNA Molecule: Synthetic oligonucleotide
uaagaagaggcuuggcuuctt

SEQ ID NO: 2312 - DNA, 21 bp, Artificial Sequence
  Description of Artificial Sequence: Synthetic oligonucleotide
  Description of Combined DNA/RNA Molecule: Synthetic oligonucleotide
guaagaagaggcuuggcuutt

SEQ ID NO: 2313 - DNA, 21 bp, Artificial Sequence
  Description of Artificial Sequence: Synthetic oligonucleotide
  Description of Combined DNA/RNA Molecule: Synthetic oligonucleotide
aaguaagaagaggcuuggctt

SEQ ID NO: 2314 - DNA, 21 bp, Artificial Sequence
  Description of Artificial Sequence: Synthetic oligonucleotide
  Description of Combined DNA/RNA Molecule: Synthetic oligonucleotide
ucccagccucacuguuacctt

SEQ ID NO: 2315 - DNA, 21 bp, Artificial Sequence
  Description of Artificial Sequence: Synthetic oligonucleotide
  Description of Combined DNA/RNA Molecule: Synthetic oligonucleotide
uucccagccucacuguuactt

SEQ ID NO: 2316 - DNA, 21 bp, Artificial Sequence
  Description of Artificial Sequence: Synthetic oligonucleotide
  Description of Combined DNA/RNA Molecule: Synthetic oligonucleotide
cuucccagccucacuguuatt

SEQ ID NO: 2317 - DNA, 21 bp, Artificial Sequence
  Description of Artificial Sequence: Synthetic oligonucleotide
  Description of Combined DNA/RNA Molecule: Synthetic oligonucleotide
uccccuucccagccucacutt

SEQ ID NO: 2318 - DNA, 21 bp, Artificial Sequence
  Description of Artificial Sequence: Synthetic oligonucleotide
  Description of Combined DNA/RNA Molecule: Synthetic oligonucleotide
uuccccuucccagccucactt

SEQ ID NO: 2319 - DNA, 21 bp, Artificial Sequence
  Description of Artificial Sequence: Synthetic oligonucleotide
  Description of Combined DNA/RNA Molecule: Synthetic oligonucleotide
guuccccuucccagccucatt

SEQ ID NO: 2320 - DNA, 21 bp, Artificial Sequence
  Description of Artificial Sequence: Synthetic oligonucleotide
  Description of Combined DNA/RNA Molecule: Synthetic oligonucleotide
uguuccccuucccagccuctt

SEQ ID NO: 2321 - DNA, 21 bp, Artificial Sequence
  Description of Artificial Sequence: Synthetic oligonucleotide
  Description of Combined DNA/RNA Molecule: Synthetic oligonucleotide
guguuccccuucccagccutt

SEQ ID NO: 2322 - DNA, 21 bp, Artificial Sequence
  Description of Artificial Sequence: Synthetic oligonucleotide
  Description of Combined DNA/RNA Molecule: Synthetic oligonucleotide
uguguuccccuucccagcctt

SEQ ID NO: 2323 - DNA, 21 bp, Artificial Sequence
  Description of Artificial Sequence: Synthetic oligonucleotide
  Description of Combined DNA/RNA Molecule: Synthetic oligonucleotide
cuguguuccccuucccagctt

SEQ ID NO: 2324 - DNA, 21 bp, Artificial Sequence
  Description of Artificial Sequence: Synthetic oligonucleotide
  Description of Combined DNA/RNA Molecule: Synthetic oligonucleotide
ucuguguuccccuucccagtt

SEQ ID NO: 2325 - DNA, 21 bp, Artificial Sequence
  Description of Artificial Sequence: Synthetic oligonucleotide
  Description of Combined DNA/RNA Molecule: Synthetic oligonucleotide
gucuguguuccccuucccatt

SEQ ID NO: 2326 - DNA, 21 bp, Artificial Sequence
  Description of Artificial Sequence: Synthetic oligonucleotide
  Description of Combined DNA/RNA Molecule: Synthetic oligonucleotide
uggucuguguuccccuucctt

SEQ ID NO: 2327 - DNA, 21 bp, Artificial Sequence
  Description of Artificial Sequence: Synthetic oligonucleotide
  Description of Combined DNA/RNA Molecule: Synthetic oligonucleotide
cuggucuguguuccccuuctt

SEQ ID NO: 2328 - DNA, 21 bp, Artificial Sequence
  Description of Artificial Sequence: Synthetic oligonucleotide
  Description of Combined DNA/RNA Molecule: Synthetic oligonucleotide
uccuggucuguguuccccutt

SEQ ID NO: 2329 - DNA, 21 bp, Artificial Sequence
  Description of Artificial Sequence: Synthetic oligonucleotide
  Description of Combined DNA/RNA Molecule: Synthetic oligonucleotide
uuccuggucuguguucccctt

SEQ ID NO: 2330 - DNA, 21 bp, Artificial Sequence
  Description of Artificial Sequence: Synthetic oligonucleotide
  Description of Combined DNA/RNA Molecule: Synthetic oligonucleotide
cuuccuggucuguguuccctt

SEQ ID NO: 2331 - DNA, 21 bp, Artificial Sequence
  Description of Artificial Sequence: Synthetic oligonucleotide
  Description of Combined DNA/RNA Molecule: Synthetic oligonucleotide
agcuuccuggucuguguuctt

SEQ ID NO: 2332 - DNA, 21 bp, Artificial Sequence
  Description of Artificial Sequence: Synthetic oligonucleotide
  Description of Combined DNA/RNA Molecule: Synthetic oligonucleotide
gagcuuccuggucuguguutt

SEQ ID NO: 2333 - DNA, 21 bp, Artificial Sequence
  Description of Artificial Sequence: Synthetic oligonucleotide
  Description of Combined DNA/RNA Molecule: Synthetic oligonucleotide
cucaaggagggacaguugutt

SEQ ID NO: 2334 - DNA, 21 bp, Artificial Sequence
  Description of Artificial Sequence: Synthetic oligonucleotide
  Description of Combined DNA/RNA Molecule: Synthetic oligonucleotide
ugcucaaggagggacaguutt

SEQ ID NO: 2335 - DNA, 21 bp, Artificial Sequence
  Description of Artificial Sequence: Synthetic oligonucleotide
  Description of Combined DNA/RNA Molecule: Synthetic oligonucleotide
uggugcucaaggagggacatt

SEQ ID NO: 2336 - DNA, 21 bp, Artificial Sequence
  Description of Artificial Sequence: Synthetic oligonucleotide
  Description of Combined DNA/RNA Molecule: Synthetic oligonucleotide
cuggugcucaaggagggactt

SEQ ID NO: 2337 - DNA, 21 bp, Artificial Sequence
  Description of Artificial Sequence: Synthetic oligonucleotide
  Description of Combined DNA/RNA Molecule: Synthetic oligonucleotide
uggggcuggugcucaaggatt

SEQ ID NO: 2338 - DNA, 21 bp, Artificial Sequence
  Description of Artificial Sequence: Synthetic oligonucleotide
  Description of Combined DNA/RNA Molecule: Synthetic oligonucleotide
uugcuuggguggggcuggutt

SEQ ID NO: 2339 - DNA, 21 bp, Artificial Sequence
  Description of Artificial Sequence: Synthetic oligonucleotide
  Description of Combined DNA/RNA Molecule: Synthetic oligonucleotide
ugcuugcuuggguggggcutt

SEQ ID NO: 2340 - DNA, 21 bp, Artificial Sequence
  Description of Artificial Sequence: Synthetic oligonucleotide
  Description of Combined DNA/RNA Molecule: Synthetic oligonucleotide
ucugcuugcuuggguggggtt

SEQ ID NO: 2341 - DNA, 21 bp, Artificial Sequence
  Description of Artificial Sequence: Synthetic oligonucleotide
  Description of Combined DNA/RNA Molecule: Synthetic oligonucleotide
gucugcuugcuugggugggtt

SEQ ID NO: 2342 - DNA, 21 bp, Artificial Sequence
  Description of Artificial Sequence: Synthetic oligonucleotide
  Description of Combined DNA/RNA Molecule: Synthetic oligonucleotide
ugucugcuugcuuggguggtt

SEQ ID NO: 2343 - DNA, 21 bp, Artificial Sequence
  Description of Artificial Sequence: Synthetic oligonucleotide
  Description of Combined DNA/RNA Molecule: Synthetic oligonucleotide
augucugcuugcuugggugtt

SEQ ID NO: 2344 - DNA, 21 bp, Artificial Sequence
  Description of Artificial Sequence: Synthetic oligonucleotide
  Description of Combined DNA/RNA Molecule: Synthetic oligonucleotide
aaugucugcuugcuugggutt

SEQ ID NO: 2345 - DNA, 21 bp, Artificial Sequence
  Description of Artificial Sequence: Synthetic oligonucleotide
  Description of Combined DNA/RNA Molecule: Synthetic oligonucleotide
aaaugucugcuugcuugggtt

SEQ ID NO: 2346 - DNA, 21 bp, Artificial Sequence
  Description of Artificial Sequence: Synthetic oligonucleotide
  Description of Combined DNA/RNA Molecule: Synthetic oligonucleotide
uaaaugucugcuugcuuggtt

SEQ ID NO: 2347 - DNA, 21 bp, Artificial Sequence
  Description of Artificial Sequence: Synthetic oligonucleotide
  Description of Combined DNA/RNA Molecule: Synthetic oligonucleotide
auaaaugucugcuugcuugtt

SEQ ID NO: 2348 - DNA, 21 bp, Artificial Sequence
  Description of Artificial Sequence: Synthetic oligonucleotide
  Description of Combined DNA/RNA Molecule: Synthetic oligonucleotide
gauaaaugucugcuugcuutt

SEQ ID NO: 2349 - DNA, 21 bp, Artificial Sequence
  Description of Artificial Sequence: Synthetic oligonucleotide
  Description of Combined DNA/RNA Molecule: Synthetic oligonucleotide
agauaaaugucugcuugcutt

SEQ ID NO: 2350 - DNA, 21 bp, Artificial Sequence
  Description of Artificial Sequence: Synthetic oligonucleotide
  Description of Combined DNA/RNA Molecule: Synthetic oligonucleotide
aagauaaaugucugcuugctt

SEQ ID NO: 2351 - DNA, 21 bp, Artificial Sequence
  Description of Artificial Sequence: Synthetic oligonucleotide
  Description of Combined DNA/RNA Molecule: Synthetic oligonucleotide
aaagauaaaugucugcuugtt

SEQ ID NO: 2352 - DNA, 21 bp, Artificial Sequence
  Description of Artificial Sequence: Synthetic oligonucleotide
  Description of Combined DNA/RNA Molecule: Synthetic oligonucleotide
aaaagauaaaugucugcuutt

SEQ ID NO: 2353 - DNA, 21 bp, Artificial Sequence
  Description of Artificial Sequence: Synthetic oligonucleotide
  Description of Combined DNA/RNA Molecule: Synthetic oligonucleotide
caaaagauaaaugucugcutt

SEQ ID NO: 2354 - DNA, 21 bp, Artificial Sequence
  Description of Artificial Sequence: Synthetic oligonucleotide
  Description of Combined DNA/RNA Molecule: Synthetic oligonucleotide
acccaaaagauaaaugucutt

SEQ ID NO: 2355 - DNA, 21 bp, Artificial Sequence
  Description of Artificial Sequence: Synthetic oligonucleotide
  Description of Combined DNA/RNA Molecule: Synthetic oligonucleotide
gacccaaaagauaaauguctt

SEQ ID NO: 2356 - DNA, 21 bp, Artificial Sequence
  Description of Artificial Sequence: Synthetic oligonucleotide
  Description of Combined DNA/RNA Molecule: Synthetic oligonucleotide
gaggacagacccaaaagautt

SEQ ID NO: 2357 - DNA, 21 bp, Artificial Sequence
  Description of Artificial Sequence: Synthetic oligonucleotide
  Description of Combined DNA/RNA Molecule: Synthetic oligonucleotide
agaggacagacccaaaagatt

SEQ ID NO: 2358 - DNA, 21 bp, Artificial Sequence
  Description of Artificial Sequence: Synthetic oligonucleotide
  Description of Combined DNA/RNA Molecule: Synthetic oligonucleotide
gagaggacagacccaaaagtt

SEQ ID NO: 2359 - DNA, 21 bp, Artificial Sequence
  Description of Artificial Sequence: Synthetic oligonucleotide
  Description of Combined DNA/RNA Molecule: Synthetic oligonucleotide
agagaggacagacccaaaatt

SEQ ID NO: 2360 - DNA, 21 bp, Artificial Sequence
  Description of Artificial Sequence: Synthetic oligonucleotide
  Description of Combined DNA/RNA Molecule: Synthetic oligonucleotide
cagagaggacagacccaaatt

SEQ ID NO: 2361 - DNA, 21 bp, Artificial Sequence
  Description of Artificial Sequence: Synthetic oligonucleotide
  Description of Combined DNA/RNA Molecule: Synthetic oligonucleotide
acagagaggacagacccaatt

SEQ ID NO: 2362 - DNA, 21 bp, Artificial Sequence
  Description of Artificial Sequence: Synthetic oligonucleotide
  Description of Combined DNA/RNA Molecule: Synthetic oligonucleotide
aacagagaggacagacccatt

SEQ ID NO: 2363 - DNA, 21 bp, Artificial Sequence
  Description of Artificial Sequence: Synthetic oligonucleotide
  Description of Combined DNA/RNA Molecule: Synthetic oligonucleotide
caacagagaggacagaccctt

SEQ ID NO: 2364 - DNA, 21 bp, Artificial Sequence
  Description of Artificial Sequence: Synthetic oligonucleotide
  Description of Combined DNA/RNA Molecule: Synthetic oligonucleotide
aggcaacagagaggacagatt

SEQ ID NO: 2365 - DNA, 21 bp, Artificial Sequence
  Description of Artificial Sequence: Synthetic oligonucleotide
  Description of Combined DNA/RNA Molecule: Synthetic oligonucleotide
aaggcaacagagaggacagtt

SEQ ID NO: 2366 - DNA, 21 bp, Artificial Sequence
  Description of Artificial Sequence: Synthetic oligonucleotide
  Description of Combined DNA/RNA Molecule: Synthetic oligonucleotide
aaaggcaacagagaggacatt

SEQ ID NO: 2367 - DNA, 21 bp, Artificial Sequence
  Description of Artificial Sequence: Synthetic oligonucleotide
  Description of Combined DNA/RNA Molecule: Synthetic oligonucleotide
aaaaggcaacagagaggactt

SEQ ID NO: 2368 - DNA, 21 bp, Artificial Sequence
  Description of Artificial Sequence: Synthetic oligonucleotide
  Description of Combined DNA/RNA Molecule: Synthetic oligonucleotide
aacccagaauaaauaucuutt

SEQ ID NO: 2369 - DNA, 21 bp, Artificial Sequence
  Description of Artificial Sequence: Synthetic oligonucleotide
  Description of Combined DNA/RNA Molecule: Synthetic oligonucleotide
aaacccagaauaaauaucutt

SEQ ID NO: 2370 - DNA, 21 bp, Artificial Sequence
  Description of Artificial Sequence: Synthetic oligonucleotide
  Description of Combined DNA/RNA Molecule: Synthetic oligonucleotide
aaaacccagaauaaauauctt

SEQ ID NO: 2371 - DNA, 21 bp, Artificial Sequence
  Description of Artificial Sequence: Synthetic oligonucleotide
  Description of Combined DNA/RNA Molecule: Synthetic oligonucleotide
accaccacguaggugccagtt

SEQ ID NO: 2372 - DNA, 21 bp, Artificial Sequence
  Description of Artificial Sequence: Synthetic oligonucleotide
  Description of Combined DNA/RNA Molecule: Synthetic oligonucleotide
ucgcuggugcugccuguagtt

SEQ ID NO: 2373 - DNA, 21 bp, Artificial Sequence
  Description of Artificial Sequence: Synthetic oligonucleotide
  Description of Combined DNA/RNA Molecule: Synthetic oligonucleotide
uuccuggcaccuccaccugtt

SEQ ID NO: 2374 - DNA, 21 bp, Artificial Sequence
  Description of Artificial Sequence: Synthetic oligonucleotide
  Description of Combined DNA/RNA Molecule: Synthetic oligonucleotide
ugaaaugccccacagugagtt

SEQ ID NO: 2375 - DNA, 21 bp, Artificial Sequence
  Description of Artificial Sequence: Synthetic oligonucleotide
  Description of Combined DNA/RNA Molecule: Synthetic oligonucleotide
ugugagcuuggcaggcacgtt

SEQ ID NO: 2376 - DNA, 21 bp, Artificial Sequence
  Description of Artificial Sequence: Synthetic oligonucleotide
  Description of Combined DNA/RNA Molecule: Synthetic oligonucleotide
aaccgugcccuucccuuggtt

SEQ ID NO: 2377 - DNA, 21 bp, Artificial Sequence
  Description of Artificial Sequence: Synthetic oligonucleotide
  Description of Combined DNA/RNA Molecule: Synthetic oligonucleotide
aagcaaaacaggucuagagtt

SEQ ID NO: 2378 - DNA, 21 bp, Artificial Sequence
  Description of Artificial Sequence: Synthetic oligonucleotide
  Description of Combined DNA/RNA Molecule: Synthetic oligonucleotide
aagcaaaacaggucuagggtt

SEQ ID NO: 2379 - DNA, 21 bp, Artificial Sequence
  Description of Artificial Sequence: Synthetic oligonucleotide
  Description of Combined DNA/RNA Molecule: Synthetic oligonucleotide
ugcaaaacagcugccaacctt

SEQ ID NO: 2380 - DNA, 21 bp, Artificial Sequence
  Description of Artificial Sequence: Synthetic oligonucleotide
  Description of Combined DNA/RNA Molecule: Synthetic oligonucleotide
cugcaaaacagcugccaactt

SEQ ID NO: 2381 - DNA, 21 bp, Artificial Sequence
  Description of Artificial Sequence: Synthetic oligonucleotide
  Description of Combined DNA/RNA Molecule: Synthetic oligonucleotide
uccugcaaaacagcugccatt

SEQ ID NO: 2382 - DNA, 21 bp, Artificial Sequence
  Description of Artificial Sequence: Synthetic oligonucleotide
  Description of Combined DNA/RNA Molecule: Synthetic oligonucleotide
guccugcaaaacagcugcctt

SEQ ID NO: 2383 - DNA, 21 bp, Artificial Sequence
  Description of Artificial Sequence: Synthetic oligonucleotide
  Description of Combined DNA/RNA Molecule: Synthetic oligonucleotide
aguccugcaaaacagcugctt

SEQ ID NO: 2384 - DNA, 21 bp, Artificial Sequence
  Description of Artificial Sequence: Synthetic oligonucleotide
  Description of Combined DNA/RNA Molecule: Synthetic oligonucleotide
cuguggccauccguguaggtt

SEQ ID NO: 2385 - DNA, 21 bp, Artificial Sequence
  Description of Artificial Sequence: Synthetic oligonucleotide
  Description of Combined DNA/RNA Molecule: Synthetic oligonucleotide
agcucagcagcuccucauctt

SEQ ID NO: 2386 - DNA, 21 bp, Artificial Sequence
  Description of Artificial Sequence: Synthetic oligonucleotide
  Description of Combined DNA/RNA Molecule: Synthetic oligonucleotide
acuggagcagcucagcagctt

SEQ ID NO: 2387 - DNA, 21 bp, Artificial Sequence
  Description of Artificial Sequence: Synthetic oligonucleotide
  Description of Combined DNA/RNA Molecule: Synthetic oligonucleotide
aaacuggagcagcucagcatt

SEQ ID NO: 2388 - DNA, 21 bp, Artificial Sequence
  Description of Artificial Sequence: Synthetic oligonucleotide
  Description of Combined DNA/RNA Molecule: Synthetic oligonucleotide
gaaacuggagcagcucagctt

SEQ ID NO: 2389 - DNA, 21 bp, Artificial Sequence
  Description of Artificial Sequence: Synthetic oligonucleotide
  Description of Combined DNA/RNA Molecule: Synthetic oligonucleotide
agaaacuggagcagcucagtt

SEQ ID NO: 2390 - DNA, 21 bp, Artificial Sequence
  Description of Artificial Sequence: Synthetic oligonucleotide
  Description of Combined DNA/RNA Molecule: Synthetic oligonucleotide
uggagaaacuggagcagcutt

SEQ ID NO: 2391 - DNA, 21 bp, Artificial Sequence
  Description of Artificial Sequence: Synthetic oligonucleotide
  Description of Combined DNA/RNA Molecule: Synthetic oligonucleotide
cuggagaaacuggagcagctt

SEQ ID NO: 2392 - DNA, 21 bp, Artificial Sequence
  Description of Artificial Sequence: Synthetic oligonucleotide
  Description of Combined DNA/RNA Molecule: Synthetic oligonucleotide
uccuggagaaacuggagcatt

SEQ ID NO: 2393 - DNA, 21 bp, Artificial Sequence
  Description of Artificial Sequence: Synthetic oligonucleotide
  Description of Combined DNA/RNA Molecule: Synthetic oligonucleotide
acuccuggagaaacuggagtt

SEQ ID NO: 2394 - DNA, 21 bp, Artificial Sequence
  Description of Artificial Sequence: Synthetic oligonucleotide
  Description of Combined DNA/RNA Molecule: Synthetic oligonucleotide
ucccacuccuggagaaacutt

SEQ ID NO: 2395 - DNA, 21 bp, Artificial Sequence
  Description of Artificial Sequence: Synthetic oligonucleotide
  Description of Combined DNA/RNA Molecule: Synthetic oligonucleotide
cuucccacuccuggagaaatt

SEQ ID NO: 2396 - DNA, 21 bp, Artificial Sequence
  Description of Artificial Sequence: Synthetic oligonucleotide
  Description of Combined DNA/RNA Molecule: Synthetic oligonucleotide
uggcaauggcguagacacctt

SEQ ID NO: 2397 - DNA, 21 bp, Artificial Sequence
  Description of Artificial Sequence: Synthetic oligonucleotide
  Description of Combined DNA/RNA Molecule: Synthetic oligonucleotide
cuggcaauggcguagacactt

SEQ ID NO: 2398 - DNA, 21 bp, Artificial Sequence
  Description of Artificial Sequence: Synthetic oligonucleotide
  Description of Combined DNA/RNA Molecule: Synthetic oligonucleotide
accuggcaauggcguagactt

SEQ ID NO: 2399 - DNA, 21 bp, Artificial Sequence
  Description of Artificial Sequence: Synthetic oligonucleotide
  Description of Combined DNA/RNA Molecule: Synthetic oligonucleotide
caccuggcaauggcguagatt

SEQ ID NO: 2400 - DNA, 21 bp, Artificial Sequence
  Description of Artificial Sequence: Synthetic oligonucleotide
  Description of Combined DNA/RNA Molecule: Synthetic oligonucleotide
cagcaccuggcaauggcgutt

SEQ ID NO: 2401 - DNA, 21 bp, Artificial Sequence
  Description of Artificial Sequence: Synthetic oligonucleotide
  Description of Combined DNA/RNA Molecule: Synthetic oligonucleotide
caggcagcaccuggcaaugtt

SEQ ID NO: 2402 - DNA, 21 bp, Artificial Sequence
  Description of Artificial Sequence: Synthetic oligonucleotide
  Description of Combined DNA/RNA Molecule: Synthetic oligonucleotide
uguguggacgcugcaguugtt

SEQ ID NO: 2403 - DNA, 21 bp, Artificial Sequence
  Description of Artificial Sequence: Synthetic oligonucleotide
  Description of Combined DNA/RNA Molecule: Synthetic oligonucleotide
cuguguggacgcugcaguutt

SEQ ID NO: 2404 - DNA, 21 bp, Artificial Sequence
  Description of Artificial Sequence: Synthetic oligonucleotide
  Description of Combined DNA/RNA Molecule: Synthetic oligonucleotide
agcuguguggacgcugcagtt

SEQ ID NO: 2405 - DNA, 21 bp, Artificial Sequence
  Description of Artificial Sequence: Synthetic oligonucleotide
  Description of Combined DNA/RNA Molecule: Synthetic oligonucleotide
gagcuguguggacgcugcatt

SEQ ID NO: 2406 - DNA, 21 bp, Artificial Sequence
  Description of Artificial Sequence: Synthetic oligonucleotide
  Description of Combined DNA/RNA Molecule: Synthetic oligonucleotide
uggagcuguguggacgcugtt

SEQ ID NO: 2407 - DNA, 21 bp, Artificial Sequence
  Description of Artificial Sequence: Synthetic oligonucleotide
  Description of Combined DNA/RNA Molecule: Synthetic oligonucleotide
guggagcuguguggacgcutt

SEQ ID NO: 2408 - DNA, 21 bp, Artificial Sequence
  Description of Artificial Sequence: Synthetic oligonucleotide
  Description of Combined DNA/RNA Molecule: Synthetic oligonucleotide
ugguggagcuguguggacgtt

SEQ ID NO: 2409 - DNA, 21 bp, Artificial Sequence
  Description of Artificial Sequence: Synthetic oligonucleotide
  Description of Combined DNA/RNA Molecule: Synthetic oligonucleotide
cugguggagcuguguggactt

SEQ ID NO: 2410 - DNA, 21 bp, Artificial Sequence
  Description of Artificial Sequence: Synthetic oligonucleotide
  Description of Combined DNA/RNA Molecule: Synthetic oligonucleotide
agcugguggagcuguguggtt

SEQ ID NO: 2411 - DNA, 21 bp, Artificial Sequence
  Description of Artificial Sequence: Synthetic oligonucleotide
  Description of Combined DNA/RNA Molecule: Synthetic oligonucleotide
uuugcauuccagaccugggtt

SEQ ID NO: 2412 - DNA, 21 bp, Artificial Sequence
  Description of Artificial Sequence: Synthetic oligonucleotide
  Description of Combined DNA/RNA Molecule: Synthetic oligonucleotide
caaaacagcugccaaccugtt

SEQ ID NO: 2413 - DNA, 21 bp, Artificial Sequence
  Description of Artificial Sequence: Synthetic oligonucleotide
  Description of Combined DNA/RNA Molecule: Synthetic oligonucleotide
caguccugcaaaacagcugtt

SEQ ID NO: 2414 - DNA, 21 bp, Artificial Sequence
  Description of Artificial Sequence: Synthetic oligonucleotide
  Description of Combined DNA/RNA Molecule: Synthetic oligonucleotide
acaguccugcaaaacagcutt

SEQ ID NO: 2415 - DNA, 21 bp, Artificial Sequence
  Description of Artificial Sequence: Synthetic oligonucleotide
  Description of Combined DNA/RNA Molecule: Synthetic oligonucleotide
cagcucagcagcuccucautt

SEQ ID NO: 2416 - DNA, 21 bp, Artificial Sequence
  Description of Artificial Sequence: Synthetic oligonucleotide
  Description of Combined DNA/RNA Molecule: Synthetic oligonucleotide
aacuggagcagcucagcagtt

SEQ ID NO: 2417 - DNA, 21 bp, Artificial Sequence
  Description of Artificial Sequence: Synthetic oligonucleotide
  Description of Combined DNA/RNA Molecule: Synthetic oligonucleotide
gagaaacuggagcagcucatt

SEQ ID NO: 2418 - DNA, 21 bp, Artificial Sequence
  Description of Artificial Sequence: Synthetic oligonucleotide
  Description of Combined DNA/RNA Molecule: Synthetic oligonucleotide
cuccuggagaaacuggagctt

SEQ ID NO: 2419 - DNA, 21 bp, Artificial Sequence
  Description of Artificial Sequence: Synthetic oligonucleotide
  Description of Combined DNA/RNA Molecule: Synthetic oligonucleotide
cacuccuggagaaacuggatt

SEQ ID NO: 2420 - DNA, 21 bp, Artificial Sequence
  Description of Artificial Sequence: Synthetic oligonucleotide
  Description of Combined DNA/RNA Molecule: Synthetic oligonucleotide
uucccacuccuggagaaactt

SEQ ID NO: 2421 - DNA, 21 bp, Artificial Sequence
  Description of Artificial Sequence: Synthetic oligonucleotide
  Description of Combined DNA/RNA Molecule: Synthetic oligonucleotide
caaaagcguugugggcccgtt

SEQ ID NO: 2422 - DNA, 21 bp, Artificial Sequence
  Description of Artificial Sequence: Synthetic oligonucleotide
  Description of Combined DNA/RNA Molecule: Synthetic oligonucleotide
auggcguagacacccucactt

SEQ ID NO: 2423 - DNA, 21 bp, Artificial Sequence
  Description of Artificial Sequence: Synthetic oligonucleotide
  Description of Combined DNA/RNA Molecule: Synthetic oligonucleotide
aauggcguagacacccucatt

SEQ ID NO: 2424 - DNA, 21 bp, Artificial Sequence
  Description of Artificial Sequence: Synthetic oligonucleotide
  Description of Combined DNA/RNA Molecule: Synthetic oligonucleotide
agcaccuggcaauggcguatt

SEQ ID NO: 2425 - DNA, 21 bp, Artificial Sequence
  Description of Artificial Sequence: Synthetic oligonucleotide
  Description of Combined DNA/RNA Molecule: Synthetic oligonucleotide
aggcagcaccuggcaauggtt

SEQ ID NO: 2426 - DNA, 21 bp, Artificial Sequence
  Description of Artificial Sequence: Synthetic oligonucleotide
  Description of Combined DNA/RNA Molecule: Synthetic oligonucleotide
agcaggcagcaccuggcaatt

SEQ ID NO: 2427 - DNA, 21 bp, Artificial Sequence
  Description of Artificial Sequence: Synthetic oligonucleotide
  Description of Combined DNA/RNA Molecule: Synthetic oligonucleotide
uagcaggcagcaccuggcatt

SEQ ID NO: 2428 - DNA, 21 bp, Artificial Sequence
  Description of Artificial Sequence: Synthetic oligonucleotide
  Description of Combined DNA/RNA Molecule: Synthetic oligonucleotide
gaacaagagcucaauaaaatt

SEQ ID NO: 2429 - DNA, 21 bp, Artificial Sequence
  Description of Artificial Sequence: Synthetic oligonucleotide
  Description of Combined DNA/RNA Molecule: Synthetic oligonucleotide
aagcaaaacaggucuagaatt

SEQ ID NO: 2430 - DNA, 21 bp, Artificial Sequence
  Description of Artificial Sequence: Synthetic oligonucleotide
  Description of Combined DNA/RNA Molecule: Synthetic oligonucleotide
gagcaaaacaggucuagaatt

SEQ ID NO: 2431 - DNA, 21 bp, Artificial Sequence
  Description of Artificial Sequence: Synthetic oligonucleotide
  Description of Combined DNA/RNA Molecule: Synthetic oligonucleotide
aggcaaaacaggucuagaatt

SEQ ID NO: 2432 - DNA, 21 bp, Artificial Sequence
  Description of Artificial Sequence: Synthetic oligonucleotide
  Description of Combined DNA/RNA Molecule: Synthetic oligonucleotide
aaguaaaacaggucuagaatt

SEQ ID NO: 2433 - DNA, 21 bp, Artificial Sequence
  Description of Artificial Sequence: Synthetic oligonucleotide
  Description of Combined DNA/RNA Molecule: Synthetic oligonucleotide
aagcaaaauaggucuagaatt

SEQ ID NO: 2434 - DNA, 21 bp, Artificial Sequence
  Description of Artificial Sequence: Synthetic oligonucleotide
  Description of Combined DNA/RNA Molecule: Synthetic oligonucleotide
aagcaaaacagguuuagaatt

SEQ ID NO: 2435 - DNA, 21 bp, Artificial Sequence
  Description of Artificial Sequence: Synthetic oligonucleotide
  Description of Combined DNA/RNA Molecule: Synthetic oligonucleotide
uucuagaccuguuuugcuutt

SEQ ID NO: 2436 - DNA, 21 bp, Artificial Sequence
  Description of Artificial Sequence: Synthetic oligonucleotide
  Description of Combined DNA/RNA Molecule: Synthetic oligonucleotide
aagcaaaacaggucuagaatt

SEQ ID NO: 2437 - DNA, 21 bp, Artificial Sequence
  Description of Artificial Sequence: Synthetic oligonucleotide
  Description of Combined DNA/RNA Molecule: Synthetic oligonucleotide
aagcaaaacaggucuagaatt

SEQ ID NO: 2438 - DNA, 21 bp, Artificial Sequence
  Description of Artificial Sequence: Synthetic oligonucleotide
  Description of Combined DNA/RNA Molecule: Synthetic oligonucleotide
aagcaaaacaggucuagaatt

SEQ ID NO: 2439 - DNA, 21 bp, Artificial Sequence
  Description of Artificial Sequence: Synthetic oligonucleotide
  Description of Combined DNA/RNA Molecule: Synthetic oligonucleotide
aagcaaaacaggucuagaatt

SEQ ID NO: 2440 - DNA, 21 bp, Artificial Sequence
  Description of Artificial Sequence: Synthetic oligonucleotide
  Description of Combined DNA/RNA Molecule: Synthetic oligonucleotide
aagcaaaacaggucuagaatt

SEQ ID NO: 2441 - protein, 16 aa, Unknown
  Description of Unknown: RFGF peptide
AAVALLPAVLLALLAP

SEQ ID NO: 2442 - protein, 11 aa, Unknown
  Description of Unknown: RFGF analogue peptide
AALLPVLLAAP

SEQ ID NO: 2443 - protein, 13 aa, Human immunodeficiency virus
GRKKRRQRRRPPQ

SEQ ID NO: 2444 - protein, 16 aa, Drosophila sp.
RQIKIWFQNRRMKWKK

SEQ ID NO: 2445 - DNA, 21 bp, Artificial Sequence
  Description of Artificial Sequence: Synthetic oligonucleotide
  Description of Combined DNA/RNA Molecule: Synthetic oligonucleotide
uucuagaccuguuuugcuutt

SEQ ID NO: 2446 - RNA, 21 nt, Artificial Sequence
  Description of Artificial Sequence: Synthetic oligonucleotide
uucuagaccuguuuugcuuuu

SEQ ID NO: 2447 - RNA, 21 nt, Artificial Sequence
  Description of Artificial Sequence: Synthetic oligonucleotide
uucuagaccuguuuugcuuuu

SEQ ID NO: 2448 - RNA, 21 nt, Artificial Sequence
  Description of Artificial Sequence: Synthetic oligonucleotide
uucuagaccuguuuugcuuuu

SEQ ID NO: 2449 - RNA, 21 nt, Artificial Sequence
  Description of Artificial Sequence: Synthetic oligonucleotide
uucuagaccuguuuugcuuuu

SEQ ID NO: 2450 - RNA, 21 nt, Artificial Sequence
  Description of Artificial Sequence: Synthetic oligonucleotide
uucuagaccuguuuugcuuuu

SEQ ID NO: 2451 - RNA, 21 nt, Artificial Sequence
  Description of Artificial Sequence: Synthetic oligonucleotide
uucuagaccuguuuugcuuuu

SEQ ID NO: 2452 - RNA, 21 nt, Artificial Sequence
  Description of Artificial Sequence: Synthetic oligonucleotide
uucuagaccuguuuugcuuuu

SEQ ID NO: 2453 - DNA, 21 bp, Artificial Sequence
  Description of Artificial Sequence: Synthetic oligonucleotide
  Description of Combined DNA/RNA Molecule: Synthetic oligonucleotide
uucuagaccuguuuugcuutt

SEQ ID NO: 2454 - DNA, 21 bp, Artificial Sequence
  Description of Artificial Sequence: Synthetic oligonucleotide
  Description of Combined DNA/RNA Molecule: Synthetic oligonucleotide
uccuagaccuguuuugcuutt

SEQ ID NO: 2455 - DNA, 21 bp, Artificial Sequence
  Description of Artificial Sequence: Synthetic oligonucleotide
  Description of Combined DNA/RNA Molecule: Synthetic oligonucleotide
aagcaaaacaggucuagaatt

SEQ ID NO: 2456 - RNA, 21 nt, Artificial Sequence
  Description of Artificial Sequence: Synthetic oligonucleotide
aagcaaaacaggucuagaauu

SEQ ID NO: 2457 - RNA, 21 nt, Artificial Sequence
  Description of Artificial Sequence: Synthetic oligonucleotide
aagcaaaacaggucuagaauu

SEQ ID NO: 2458 - RNA, 21 nt, Artificial Sequence
  Description of Artificial Sequence: Synthetic oligonucleotide
aagcaaaacaggucuagaauu

SEQ ID NO: 2459 - RNA, 21 nt, Artificial Sequence
  Description of Artificial Sequence: Synthetic oligonucleotide
aagcaaaacaggucuagaauu

SEQ ID NO: 2460 - RNA, 21 nt, Artificial Sequence
  Description of Artificial Sequence: Synthetic oligonucleotide
aagcaaaacaggucuagaauu

SEQ ID NO: 2461 - RNA, 21 nt, Artificial Sequence
  Description of Artificial Sequence: Synthetic oligonucleotide
aagcaaaacaggucuagaauu

SEQ ID NO: 2462 - RNA, 21 nt, Artificial Sequence
  Description of Artificial Sequence: Synthetic oligonucleotide
aagcaaaacaggucuagaauu

SEQ ID NO: 2463 - DNA, 21 bp, Artificial Sequence
  Description of Artificial Sequence: Synthetic oligonucleotide
  Description of Combined DNA/RNA Molecule: Synthetic oligonucleotide
aagcaaaacaggucuagaatt

SEQ ID NO: 2464 - DNA, 21 bp, Artificial Sequence
  Description of Artificial Sequence: Synthetic oligonucleotide
  Description of Combined DNA/RNA Molecule: Synthetic oligonucleotide
aagcaaaacaggucuaggatt

SEQ ID NO: 2465 - DNA, 20 bp, Artificial Sequence
  Description of Artificial Sequence: Synthetic oligonucleotide
  Description of Combined DNA/RNA Molecule: Synthetic oligonucleotide
aagcaaaacaggucuagaat

SEQ ID NO: 2466 - RNA, 19 nt, Artificial Sequence
  Description of Artificial Sequence: Synthetic oligonucleotide
aagcaaaacaggucuagaa

SEQ ID NO: 2467 - RNA, 18 nt, Artificial Sequence
  Description of Artificial Sequence: Synthetic oligonucleotide
aagcaaaacaggucuaga

SEQ ID NO: 2468 - RNA, 17 nt, Artificial Sequence
  Description of Artificial Sequence: Synthetic oligonucleotide
aagcaaaacaggucuag

SEQ ID NO: 2469 - RNA, 16 nt, Artificial Sequence
  Description of Artificial Sequence: Synthetic oligonucleotide
aagcaaaacaggucua

SEQ ID NO: 2470 - RNA, 15 nt, Artificial Sequence
  Description of Artificial Sequence: Synthetic oligonucleotide
aagcaaaacaggucu

SEQ ID NO: 2471 - DNA, 20 bp, Artificial Sequence
  Description of Artificial Sequence: Synthetic oligonucleotide
  Description of Combined DNA/RNA Molecule: Synthetic oligonucleotide
agcaaaacaggucuagaatt

SEQ ID NO: 2472 - DNA, 19 bp, Artificial Sequence
  Description of Artificial Sequence: Synthetic oligonucleotide
  Description of Combined DNA/RNA Molecule: Synthetic oligonucleotide
gcaaaacaggucuagaatt

SEQ ID NO: 2473 - DNA, 18 bp, Artificial Sequence
  Description of Artificial Sequence: Synthetic oligonucleotide
  Description of Combined DNA/RNA Molecule: Synthetic oligonucleotide
caaaacaggucuagaatt

SEQ ID NO: 2474 - DNA, 17 bp, Artificial Sequence
  Description of Artificial Sequence: Synthetic oligonucleotide
  Description of Combined DNA/RNA Molecule: Synthetic oligonucleotide
aaaacaggucuagaatt

SEQ ID NO: 2475 - DNA, 16 bp, Artificial Sequence
  Description of Artificial Sequence: Synthetic oligonucleotide
  Description of Combined DNA/RNA Molecule: Synthetic oligonucleotide
aaacaggucuagaatt

SEQ ID NO: 2476 - DNA, 15 bp, Artificial Sequence
  Description of Artificial Sequence: Synthetic oligonucleotide
  Description of Combined DNA/RNA Molecule: Synthetic oligonucleotide
aacaggucuagaatt

SEQ ID NO: 2477 - RNA, 19 nt, Artificial Sequence
  Description of Artificial Sequence: Synthetic oligonucleotide
uucuagaccuguuuugcuu

SEQ ID NO: 2478 - DNA, 21 bp, Artificial Sequence
  Description of Artificial Sequence: Synthetic oligonucleotide
  Description of Combined DNA/RNA Molecule: Synthetic oligonucleotide
gccuggaguuuauucggaatt

SEQ ID NO: 2479 - DNA, 21 bp, Artificial Sequence
  Description of Artificial Sequence: Synthetic oligonucleotide
  Description of Combined DNA/RNA Molecule: Synthetic oligonucleotide
uuccgaauaaacuccaggctt

SEQ ID NO: 2480 - RNA, 19 nt, Artificial Sequence
  Description of Artificial Sequence: Synthetic oligonucleotide
gccuggaguuuauucggaa
